United States Patent Application Publication US 2026/0327603 A1, published October 22, 2026 (application 19/486,480).

The application's sequence listing, which the Patent Office published only in electronic form, follows.

SEQUENCE LISTING (25 sequences)

SEQ ID NO: 1 - DNA, 18 bp, synthetic construct
  source 1..18: mol_type = other DNA
tagggataacagggtaat

SEQ ID NO: 2 - protein, 9 aa, synthetic construct
LAGLIDADG

SEQ ID NO: 3 - DNA, 149521 bp, Homo sapiens
  source 1..149521: mol_type = other DNA
aggcgccggcgtggagctgccgcacgtgggagggcgctggccaggcagccactgtggcctctgcggctaggccggctcgagactcccgggcgcccaggcgctgccgcccgcctcgccgccccacgccgaaggaccacgcgcccgccgccgccagcctctcagcgctcccatgatcgcccggtgccttttggctgtgcgaagcctccgcaggtacctccagcgcgcgggttaaccttggccgtgggcagggcggggtctttcgccgtgtggtgcctggagcccggacccaccccttcccgaccgcgcctctccgacgctcccgggacgcaccctccccgcggcttgcaaggtggacccctgggggacacctggcgcggccacctggggccacctttcccgcctccgctccctcgggaggacgtccattcctctttgtttgggactgcctcagccgcagtcagcgaggctggtcacagacgcggcccaaaatgaatgcaaatagtttggataagaaaatcatttcacgttcaatcccaatgcagaactacagacctgtcattaaaagtgccgcagctgtggactcagaacaattgtgtttgctcctcgcgcccattattagcattccaatcgtttaacatccacccgagatgaaacctctttggtggtgttgcttgtttccgtccatgctctctgacttccttttttattttcctcctccccataaaacaaacattctgcctcttgccggtgcaaattgacttggcccaaaatggagaaaatgatcgcttggacacggctttgggcagcctgagctgctgttttggattgcttcctagccctctaaccacaccccactgcaacagaccagtagcaagatggtgagggaattaaattctttgcacggatgcgctggttttcggaaacaatgccgccaccatccccgtttccaaatctgcccagaactgtaaatccaaatgaagattcaacagaataaagaaaatgtgtgcttcttgctagctatcaacaaaactactttgtaacatgtcagcatttaagctttctacagttcccttttgcacattgccactcgtctgtgtggatggagctttgtgttgctcagtccgtagagttagggagcaggcaggcgacagtggttaattacaaagagttaatgtggtgattggtgaccatatttcagcctgtcgttttttgctagtctccaggctgcaatcgatatagctgtcaaatgaagttataccaagaaatgaagacttcacataatgcaggggtgagaggagggaataaatcttcatataagagcaattctcggccgggcgctgtggctcatgcctgtaatcccagcactttgggaggccgaggcgggtggatcacgaggtcaggagatcgagaccatcctggctaacacggtgaaaccccgtctctactaaaaaatacaaaaaattagccgggcgtggtggcgggcgcctgtagtcccagctactcgggaggctgaggcaggagaatggcatgaacccgggaggcgaagcttgcagtgagccgagatcgcaccactgtactctagcctgggcgacagagcaagactccgtctcaaaaaaaaaaaaaaaaaaaaaagaacaattctcaaactttttattctcaggacccctttacctttcaaaaattaccgtggacctaagagcttctgtttgtgtggtatatctgtctatatttaccatattagacattaaagctggaaaaaaattaaagtagttgttaatttacaaaactaataaataggctaggtgcataaatagtgattttaatgaaaaataactattttccaaaccaacccccccgccccccaatcagtgagaagattaacattgtggggttttttcccttttttttaaaattgtggtaagatataacaaaatttaccattttgataatttttaagtgtacaattgagaggtacagccaacaccactgtccatctccagaacttgtcatcatcccaaactgaaaccctgtacctattacacaataactgcccattacttcctcccccaatccctggttaaccattattttttctctatgaatttgagtatttcaggtcccttatataagtggaattagacaatatttgtccttttgcgtctggtttatttagtatagcgtttttaaggtttattcgttttgaagcatgtgtcgggatttcctttttaaaactgaataatatttcattgtatgtatataccacattttgtttatccatttgtcagtggacatttgggttgcttccaccttttggctattgtgaatactactactatgatcattaatgtgcacatgtctgtttgaatccctgcttttaattctttgggatactgtatgtacctagaagtgaaaattgctgagtcataggatagtactatgtttagtttttgaaaccatactgttttcttcagtggctgtaccatttttacattcccattggcagtacctaaggattccaatttctccacatcatcatcagcacttatttcctggttttgataacagttatcctaggagtggcattgtttcttttttttttctttttttttttttttgagacagagtctctctctgtcgcccaggctggaatgcagtggcgctatctcggctcactgcaagcgccgcctcccgggttcacgccattcccctgcctcagcctcccaagtagctgggactacaggcgcccgcaaccacgcccggctaattttttttttttatttttagtagagacggggtttcatcctgttagccaggatggtctcgatctcctgacctcgtgatccgcctgtctcggcctcccaaagtgctgggattacaggcgtgagccactgcgcccggcagaagtggcactgtttcgcatttttgcaaaactaatgtgtgacataatagaaggtaactggattcttatgtctgcctctgcatttaagctgctgcactgtttcattttggtttaagatgaagaaaatcccacctcacagtcatatgaagttggaaagaagaatattttaatagctttttaaagataatcatggatgttctttgatatcacatcaaagtttgacaaatcgtagctttttaaaggttagttacaaagtggaatttgaaactatatcaatgtacttgttttacactgttacattaatatccaatggtgtaccttacactttgaatggatgttgaatccatgcctgttttttaaaacattaagcataagtccttcggaaattttagtggttcactgtgttatacagttcttcctaatgttgacatatttcattatacagtatcaaacaatcactttccttaatgtcttcctatttagtcggaaaagtcttcaagtattgggaagctgtcaagctcacagtggcagataggattttccaaaattctagttttcacttgaaagctagaattttatcattggtaacacaaactgtcagttgttttacttgaagtgacaatctcactttgttacatttttgacagaatttctgccacatacttaagtctgaataaccctggtttgtctgtcagtagtttttttctggtaaaaatggtgttccatgggctgggcacggtggctcacgcctgtaatcccagcactttgggaggccatggcaggtggatcacgaagtcaggagatcgagaccatcctggctaacacggtgaaaccctgtctctactgaaaatacaaaaaattagccgggcgtggtggcgggcgcctgtagtcccaactactcgggaggctgaggcaggagaatggcgtgaacccggaaggtggagtttgcagtgcgccgagattgtgccactgcactccagcctgggcgacagagcgagactccgtctcaaaaaaaaaaaaaaaaaaatggttttccatgaaaaaaatctatttcagctcacagttcaaccaattgcaaaagtgcttttgatttgggcaaccaaatcctcaggacaacccttatactcaggtacacagcagaaatgctttgtgtgtacttggtcacatataactcaaaggtagagatttaataaaaattcatactttttaccatttcattaaggatattctaaaatgaaattgacattatttttagcctgagtgcatggcaatgaaaaatatagctactagtatagtttggtgtcattgcctcaatttgtgctgaagtaccaacagtattatccaccattccttttcgccatcagtgcaaatgttcataaagtaaaaaggataaataatgtcttagtattgttatgaaagatttttaacctcacagattccttgaaagtgtctcaggaacccctccccatacctctacctttaaggtttgtggactacattttgagagctgccgatatgtggtattagattctttgtttatgcatggaagaaaataaatatactaatagccaaaaaattattaccttgttagaagctaccataaatatattaactaatttgttacataagggcatatcttacagttaatcatcatatatggtagtccttaacccagggcttccttgacttaatcacagaatctgctctgtttcaaaatcagtatcttccaaaagagttcatattagacaacatggaggaccccctgtgttctcctgtttttcctgtttcctctgacacttgggagttcattttagtgttatggagtaactaggcttttgcctaactgacttacagtttccattgggttttcttgttggcagagctgctatatccccttcccaaggccagcttccagctaggatcattgattggggtgttcagccaacttcttgggaataagtggactgagaatctggagtttggattatagttgctgttcaattcactttgtgaccttaaaaaaatcactcactcccttggacctctttcaagttatgtacctatgtatgtatgtattttagagacaaggtctcactctgtcatccaggctgaagtgcagtggggcatgatcatggctcactgcggtctcaaactctggtttcaaacaatcctccctgcctcagccttctgagtagctgggactacaggcgctcaccaccatgcccagctaatttgaaaaaattgtttgtagagataggatcttgctatgttgccgaggctagtctagaattcctggccacaaatgatcctcccatctcaacctctgaaagtgctgggattacaggagtgtactatcatgcctggcccaggttccttatattgtaaaatgaaaaggactagactaaataatagctaaggccttaaaaaaaaaacaaaaagcaaaaaacctctatattgccatagcaaaccaggagaattcctcctcctacctcagattgtacagcatgtgacccaagcaaagcctaatgtatattatagaataagagggatgagtgacatggtcaaagaaacaaacgagaaggttgactcaacaatatttagccgaaacaatagctgtaatagcctagcttcctcttgcaattagaaaagacagcttggtttgttttttggtttttgtttttttgagacagtctcgctctgttgcccaggctggaatacagtggcatgatctcggctcactgcaacctctgccttctgggttcaagcaattatcctgcctcaggctcctgagtggctgggattacaggtccccacaaccacgcctggctgattttttgtatttttagtagagctggggtttcactatgtgggcctggctggtcttgaactcctgacctcaagtgatctgcccacctcagcttcctaaagtgctgggattataggcgtgagccactgcacctggcctaaaaaacacagcttggttttttaaaatgatgacagcaatgcgtgttcattattgaaaacttagcaagtaatgacaagcaaaagaaaatattaaatatatatataatccagccacctggaacagccaattcttaacagctttcaaaatttcctctatgaacagactttctttttataaatatgatattgttattcttttataatttttaatattatacaaacatcccctaaaatataaatagctataatatattccttttggggatgtatgcaatttgattaatatacgcctttagaaatgtcaactattcccaacttcctgcaatgagtaatagtgcttggataaacattcctattgtccttttccaaatctttagttattttcttagtataaattcttacaaatggaatttgtacatcaaagggcatgcatacctttcaggtctttggtacttatcatcttattctattctaaaaactttctcccaaattataaccttaccaggtgagtaagtaaatgctggtttcctatactgttaccaacattgagcattttaattttttttatccttaccagtttgataagtggaaatttctcttattataatttgcattttcatacatttttggaaggtttattcagtgagtataattcctaaacaaaaattcaggagttgtggtctggaaaccaaaaagttatttgttgtctgatgtgaaaatttatttatatggaaaatcttagaaagtcagacaaattcaattacagttttcttggtgtttttgtttgtttgtttgagacagagtctcacttggttgcccaggctagagtgcagtggcatgatcatggctcactgcagcctcgacctcccgggctcaaacgatcctcccacttcagcctcccgagtagctgggactacaggtgtttgccaccacacccggctaatctttgtatttcttgtagagacagggcttcgccatgttgcccaagctggtctctaattcctgggctcgagtgatctgcccgcctcaaccttccagagtgctgggattacaggcatgagctactgggcccagcctaaattacagttattaataaacttaacaatatttacaggtctaagtgtaattaaataaaattgagattattcctctaaaaccagtaggcataatctccaaaatgttaagagaacagtattggggaaaaaaatctagtaaagaaagggttttttaagttaaagtatcaagagctaggttgacattatttgtacaaatggatttggttataaaataggttttcttttctttttttttttttttttttttttaggatggagtcttgcactgttgcccgggctggagtgcagtggcacgatcttggatcactgcaacctccgcctcctgggttcaagtgattctcctgcctcagcctccggagtagctgggattacaggcacctgccaccacgcccagctaatattttgtatttttagcagagacggggttttaccatgttggctaggctggtctcgaactcctgatctcatgattcacccgcgtcggcctcccaaagtgctgggattacaggcgtgaaccaccgtgctccgccgaggattgatttctttcttttttgtttgtcctttaaccctggttttggtcagaagcaacctggttctttctcagagttaaacattatcacctctttggttaagacaaagcacaggacttacttgggaagaatcccctgaattaaagatatgaagaaccaaggaaactgatgtgtattgaatacatatgtaaatgccaagctgccgcattgcaaagtgcatgtagcatcatagagtcgactatataaatctagaaacagctcgcctgagtttgaatgctggttttgccactgactagcattgtgatcttaggcaagaatacttaagttctccgtatctgtttcctcctcagtaaattgataattgattggctgatttcttcattcaccaaatatttattgtctattatatgcgaaatagtattcttggtctggggatatagcaatgaacaaagcagataaaaatctttgcattaatggaacttacattccagtgggagagacaactaaggaaaatataaagtaagttagatgggaaaatgtgctgcagagcaaaagtaaaatgggaaaggggaatgctcagtaccgataggaaggaaattgtagagtcaacaggaaaggctaccaagaaagtgatattaatacttgagtaatgatctaagagaaatgagcagttgtgctatgtgaatacctgaggcaggtcattctaagcaggagaaacggcacacaccaaggctctgaaagcagggctatgcctggtgtttttgagaaagtaaagagaccattgtgactagcatggaataaatgtcaggcaagtaagtaggagatgagacagggaaaaattggactcatccttttttttctattttcttctttttttttttttgttttattcgtttgtttttagatggagtctcactctattgctcgggctagagtgcaatggcgcaatctcagctcactgcaacctcctcctcctgggttcaagcaattctcccacctcagcctcctgagtagctgggattacaggcacccgccatcatgcccagctaatttttgtattttttgtagaaacaggggttcaccatgttggccaggctggaactcttgacctcaagtgacccacctgcctctgcctcccaaagtgctgggattacaggcgtgagccaccgtgcctggcctgtactcaccttttaagattgaaacaaatatagaacactttgaacattgcctggttatatccattcctattaccacaaaaatgctgtataacaaactgaatttcagtggagtacaatgatcaatgtttatttttgctgacaaatctagattttggctgggcagtttttctgatcttaactcattcatgctccttcagtcagccatgggttgtgtaggcagctctgctgatctctgctatcctctctcacatgtttggtgatgtaggatggccacagctggggctatttggccctctttcctgtgacgtctcgtcctccaagaagccacctctggcttgttctcatgtcagtggcagggttccatgagagagtggaaggcagttggaactggaacctcattagctctgccacattctactggtcaaagcaagtcacaaggctagcccagattcaagaagtggggaaacagactctatctcttgatgggtagaacagcaaactcacattgttaagagacatagactcatagcaggtagaaaattgaggccatgttagttatcagtctaccacatcggcacataataaaatctcgagaaatattagttactgtttttacttgtgtgaattgcctagttttattttgggatttttaaaattaggattattactttgtaagagcccctcatagatgtttcagttgtttttgatctttgaacttttggggtagattattgttgctttttgcttttttgctttatccctacaaaagtttaaatttttatacagtcagaaatatcagtcttttcctttatgatttctgcctttggtctcattcctagaaagtccttctccaccccaagattatgtattttaaaaatcacctacattttcttttttttttttttttttttttttttcagacagagtctagctctgtcacccaggctggagtatagtggaacaatctcatctctctgtaacctctgcctcccagtctcaagcagtcctcccacgtcagccttccaagtagttgggactacaggtgtgagccaccacacctggctaatttttgtattatttgtagagacaaggtttcaccatgttgcccaggctgatctcaaactcctgggctcaagcaatccttccacctcagcctcccaaagtgctacgattacaggcatgagccaccacacccagcatctacattttcttctagtacttttatgtttcatttttcacacttaaaccctttatctatcatgagggctgacttttttaaaaagacttcttcaaattattgagtgaaacaaaaaggaaatcaacaccgaaactgcaaaactgcaagaagtataaaaggaagtccagcttatgaaatctggatttcccgttcaccatagcttacattagaaagactctgcccagagggatggcccgggccagatgctacagagagagacatgcagggagctagttagtcaggggttcagatctagggagggtgcatttgtgaattcctttttaggaagtgtgtttgaagttaatatgatgaaacttacacttcatatagaggagagtatgaaagaagggaaagtgcatcaaacctgtgcgtttcacagtagaagctccgtcctcacagcttagtaaacaccaatgatcctgtctctaattctctgtctgtaaaaggttcttttgaaccccaggaaaagtagttgacatgagaaaagcgtgcttcttggacagaggtgagggagtaggcaggagagtggtataaagtgataggtggtttgcagacgcgggcacgtcagggaacctttgcagacaggtggccctagctgatgtccctagaccttgctcagttgagttctttgtgcacatctcccactgggctcctctggcccagagatgaggttgtctgctgaaagatgcagtaaagaggctttaaagattttgtggccttgaaccaatcacacaagcaaggctgaaaggactgagcctaaaatggagctgcccctgaatgatctgagtcttcatcaggcagcaccttgcacacagaccatcatctgatgatgggaacaaacttgtgtttgggtgaaacaggcttccccattgcagttactataacacctgtgtggtagtaaggtgcagaattactcaatgcccacttcaagtttaccattgagatgatttcccacccccctcctctaactggcaccattgcccataactaatttcttgctctccccaggtgcctcaagaacctcttgggggcctttatattctgtcatgcttacctagctgatcgggacatggagtgtctgtcttagtaaccaagcctcagtcagctaaaggagctgcatctgattcatatcctaatgtggaccaccaatcttgagccccttggagctctgctagagaaagttgctgctactctcgagaccctcacgttaaaggactgtcagatccaggactcccaactcaggctcctcctgcctgccctgagccactgctcccagctcaccaccttctactttcatggaaacgagacctccatgaatgctctgaaagacctgctgtgtcacacaggcgggctgagcaagttaggcctggaattgtatccttcccatctggagagtcttgacaacaggggtcatgccaattgggagatccttgccccaattcgggctgagctgatgtgtacagtcagggaagtcaggcagcccaagaggatcttttttggtcccgtcccctgcccttcctgtggctcatggccatctgagaaagtggacctccatctttgctcttagggaaggcctgattagtgggatggatacgctttcttctggacccttgggcactaaaatctaggacacaggtgcttttttttttttgatggagtctcgctctgtccctcaggctgaagtgcagtggcacaatctcagctcactgcaacttccacctcccaggttcaagtgattctcctgcctcagcctccctagtagctggtgttactggcatgcaccaccacacccaactaattttgtatttttttttcttttttttttttgagacggagtctcgctctgtcacccaggctggagtgcactggcacgacttcggctcactgcaacctctgcctccagggttcatgccattctcctgcctcagcctccagagtagctgggactacaggtgtccaccaccacacccagctaatttttggtatttttagtagagtcagggtttcaccaagttagccaggatggtctcaatctcctgacctcgtgatccacccgcctcggcctcccaaagtgtaatttttgtatttttagtagagacagggtttcacgatgttggaggaggctggcctcaaactcctgacctcaagtgatctgactaccttggccttccacagtgctgggtttacaggcatgagcagcctggcccggtcaggtgcatcttaaaggaagcacacggtcatgtgtttcaggcacgtgctgactgtgagtggaaaaacaaaggtgactcagctgggggcagaactgggtgaaaatgctgacttggcatcaataaagccttcagggacctgtttcctagactcagaaatggaacctgaagttctagaatgatgcaggagttaccctcgcacggatggttatttaaaaatgtcaaaaataaatggaacctgaatggaaaaaaaaaaaaagaaagactctgcccattctgcccactctgagattgtctatgcttcctgtttggcattcaagaggaagtcctcatatttcccagccatattttgctggtatctttaatatttaatcccacttgtggtcaacaccgaaaggaaaattctatttctgcctcacatctcaggtggagttgtagtgactgaaataatcacaggttgatgaagcctgcttgctacaatgtataaggtccatactgtcagggctacatagatctaactattctaacactgagatttatacatctatacattatttttattctcataggaattctttttaaggtttcgtagctttctcctctgccaagatacaaaatagggaaccacaaattatttatttaaaaaagaaatagatgaatgatattagattccaactaccaattggacagctcctgaggtctcacagtcagccacttttttatcttataagtgatatggtttggctgtgtccccacccaaattgaatcatgaggcagttacccccatgctgttctcatgatactgagttctcacaagatctgatggttttataaggggctttttcctctttgctcagcacttctccttcctgccaccacatgaataaggaggtgtttgcttccccttctgccatgattctaagtttcatgaggtcgccccagccatgctgaactgtgaatcaattaaacctgtttcatttataagttacccagtcttgggcatttcttcatagcagcatgagaatggactaatacaataaatacttattgaacacctattatgttgttgaatctcaatatcaccttttcctaaattgacggaattcccctggcttgcttttttgccattgttctttgcctcagtgtcaccatttacgcaagtccaaagcctaggagccattccttgcttttttctctatttcctttaccttttccaccaacaccaagtcctggatagtcttcacattctttctcctttctttgttcccagtatcaccatcataatccaaatcttcctcatcatgagtcccagcatcaatttttgcttaccactaatatattttccttatgaaaatagagatctttaggaactacaaatgtgacatgtcatacttcagtttgcaatttttctttacttgtcattaaacaatcaaaactctcttgtggtttagaaatccctatacagtctgacccctgtgtagctctcccagcttctcctctcactcagtgaactcaatgcttcagccagagagtttatgtccttatctcctggccttaaattaacataagctgatctcttatttggaacattcttttctttctctcccatttccagagcctaatacttattcatttatcttaagagttatgaaatattatacacaaaaaatgtaatgcatatacgtatatacatgtgactaaaaggatgaaaaatgtgtcaatatataaaatgatatttctagtatgaaaaatatatctatatgtaaaatgatatttctagtaccgttgaagttccttgagtgcccccttcaaccatgtccctttcctcataccagagataaccacagtcttgaattttgtaattgctgtcctcttgcttttctttataaacattacaacaaatgtatatttccctaaacaacatatgatttagttttgcataatgaaactagtttcacatggatatggttcatttttactgttgtaagatatttcattgtgtgactattccaaaaatttactttttattttgtcaatgaatatttgggcttccattttcttgatattacaagcaatattgctatgaatattcttataatgtctcctgatacatatgtgtaagagtatgaatttaagagaacaattactaggttgtaggatgtacattctcaactttaccaaataatgcccaattctttttccaaagtggttatactaatttacttccttctctccatatagtattcatgagtagccattgatccactgtccttagcagctcttgttgttgtcaagccttttgccaatccaatggttgtaatggtattacttggcttttatatatatttgctgtgttactaatgagtttgaacatgttttcgtgtttctttgccatttgtattttgtgcctgtttatgtcttttgcccattttcctgagttatctttttcatattgaatttacactctacagtatttatacattttagatattgttcacttgttttccagtattcaaaaaacatgactagtcatggtggctcacgcctgtaatctcaacactttgggaggctgaggcaagagcattacttaagcccggaagtttgacacctgcctgggctatataggaacaccctgtatctacaaaacattaaaaaaaaaattagctgggcatagtggcattcatctatggtcccagctactcggaaggctaaggtgggaggattgcttgatcctgggaggtcgaagctgcagcgagccatgatcatgctgctgcactccagcctatgcgacaaagggagactctgtccagcctatgcgacagagggagactgtctccaaaaaaatatgtatatttaatctgtgtttaatctgtacaagccactgagctaaactctaagaatacagctgtggataagacagaaactgctcctgccctcatgggtttatcccctcacttaaagggggtcaaaaagtaaactaataaatctctaaactaataaatctctaaatggtaacatcatcttagctttgtactttctgagggtgaagttaccagacccctactaaattctttccccctgaatcctgtattaatacttccatagtacaaacattattattaataatgtttttcttcaccactagttgacaagttttctgaaatcagcagcctatttttttgtttttcatttctgtacctccactacttaacatggtcattacataagggatgcaaaataaatatattcattgaatggatgaatgaaaatatgtcattactaataataactgaaaattcagtgttcactattgatatctagggagtataggtctagatctggcattttgatactgacaattacaggtataactttcagtagaaagtagatatttcaagccctatataaagtagctgggtgcagatttcttaatacaaaaacccggttgcctatgtctacatgttaggtaagccaatttagatttagtcattttataccaaagttatttacagaaaaaaagtagacctagttgtattatcaaaaaattagagttgactgggcacagtggttcactcttgtaatcccggcactttgggaggctggggtgggtggaccactttagctcaggagcccaagaccagctcgggcaacatggcaaagccgtatctctacaaaaattacaaaaattagggcgtggtagcatgtgcctgtagtcccagctacttgggaagctgaggtaggaggatcgcttgcacctcgggaggcggaggttgcagtgagccaagattgcaccatggcactccagcctgggtgacagagctagaccttgtctcacaaaagaaaaaaaaaaaaaagccaaggcaatacaacctagtaagagtgataaggcacatactaataaataattagaatacaaggcagaaggtgataagtaccacagagtggagagattgatatggaagatcagggaaaagatattacttccaggataaaaaggagggggaaaggccaggtgtggtgcctcatgccataatcccagcactcctaggaggatgaggcaggaggattgcaggagcccaggagttcaagactagcctgagtaatatagtgagacctcgtttctacaaaaaatgtaaaaagccagatgtagtggcacacttcagtggtctcaggaggctgaggtgagaggatagcttgagcccaggaggcaaaggttgcagtgagccgtgattgcgccactgcactctagcctgggcgacagagcaagatcctgtttccaaaaaaataaaataaaacaaagaaaaaagaatacaatatattgttaactataatcatcatgtagtacaatagatcttttgaacttattcttcctatctaagtgaaattttgtatcctttgaccagcatctctccaactccctcctttcaccagcagtcacctcagctgctagtaactacctttctacattttttcttttttaagacagagacttgctctgttgcccaggcaggagtgcagtgatgtgatctcagctcactgcaacctctgcctcccaagttcaagtgattctcctgccccagcctcctgagtagctgggatcacaggtgcgtgccacctatgatatatatgtgtgtatatatattttttatatatgtttatatatatgtatatataaatatatatattatatatttatatatattttataatatatatttatatatataaatatataatatatatataaaaaatatatataaattagcctggctaaattttgtatttttagtagagatggggtttcaccatgttcgccaggctggtttcgaacttctgacctcagatgatctgaccacctatgcctcccaaagtgctgggattacagacatgagccaccatgcctggccaattctactttctatagtacttctatgagatcaacttttttacattccacatatgagtgagatcatgcagtatgtgtctttctgttgctggcttatttcagttaacactttccaccaggttcatccatgttgtcacaaatgacagaatttccttttttatggctgaataatatttcattgtgtatgtataccacattttctatatccatttgtcagctgatggacacaagttgattctatgtcttgtctattgtgaataatatatagcaaacatgagagtgtggatatctcttccatattgatttcattttttaaagatatattcccagtagtgggattgttggattgtatagtagttctatgtttaatattttgagaaacctccatactgttttccataatggctgtatgaattcatattcctactaacagtgtgtgcgggttcccttttctccaccaaagacttgctatctttggtcttttccataatagctattttaacaggtgtgagatgatgtttcattgtggttttaatttgcatttccctaatgttgatgttgagcatttttttcatatacctgtttgccatttatatgttgcttttgagaaatgtctgtttgagtcctttgcccattttttattggggttgttttcttgctattgaatttattgagttacttgtatattttggatattaatcccttatgagatgtatattttgcaaatatttcctcccattctataggttgtctcttcattctgtttattgtttcctttgctgtgcttattagtttgatgtaatcccatttgtccacttttgcttttgttgactctgcttgtggggtcatatccaaaaaatcattgcccacactagtgttatggagcttttcccatatattttctgtcttagttcattttctgttgccataattgaatgcctgaggctaggtaatttataaagaaaagaaatttattatttacggttctggaagctgggaagtgcaaggtcgagggtcttctgcatctggtgagggccttctcagtgtgtcataacatggtggaggacataacgcggtgagtgaggcacactgagaacaaaactggctcctatgacagatctactcttctgataactaacccactcctgttcttccccattaattcacccactaattcatgaatggattaatccacttatgaaggcaaagccctcatgacccaatcatctcttaacagcttcacctcttaatactgttaaactgaggattcagtttcaaaatgagtttcaaagggaacaagcattcaaaccataaccattttctgctagtagtttcacagtttaggatcttacatttatgtctttaatccattttcagttgatttttgtatatgggatgagatgagggtctaatttcattcgactgcatgtgaatctccagttttcccaacaccgttccctgaagagactgtcttttcgtgtgttcctggcatcttcgtccaaaatcggttggccataaatgtgtggatttatttctgggctttctaggctgttccatcagctatgtgtctgttttatgccagtaccatgctgtttggttactatagctttgttatatatatatattttatatatacgtatattatatatatataatatatacgtaattcttttttttttttttttttcttgagatggagtctcgctctgttgcctaggctggtgtgcagtggcgtgatcttggctcactgcagcctctgcctccctggttcaagcgattctcctgcttcagccacctgagtaagtaactgggattacaggtgtacaccagcacacccagctaattttgtatttttagtacagggtttcaccagttggccaggttggtctcaaactcctgacctcaagtgatcagcctgccttggccttccaaagtgctgggattacaggtgtgagccaccatgcctggcctttgtaataagttttgaagtgaggtagtatgatacctccagctttattctttttactcaaaattgctttggttatttggaaccttttgtggtttcatacaagttttgagattgtttttctatttctgtgaagaatgtcattggtattttgatagggattgcattcaatctgtagatcactttgtgaaatttttttttcaaaaacataatcataataccattgtcacacgtaaaaataattaacacttatttttgactgaaccagtcttaacaagaagcatactagctattagccaggcctcagatgagaggatctaggcatcatcattcacacaacaaaatatttatgtgtaaatgacacacactaacaagcctaagtattaaataatgtactgaaagaggagagtctctctcctgagtaatttactaaggacttcaattgtgaaaagtatgccccaaacaccaattaagtgtgccaaaagcaatttattcatgtttctagagaaaaataaaaggggaatatctgagttgtggttttccatgtatgtggatagtcgcattagtaatgaatcaaggaacactttatttcatttgtgaagcagcacttgattttatatgctctgtggtctcagttggctttacataagccagggataggatttaagaaaagaaatctcttcaagttcatgtataatcaatttatttagaacctataatcattaagttagctgtgtcatatacaaaattagaagaaaattaaccaattatcttttgttacttattttttagaacctgagatttttgttcaactttgtaatgtgaaccttttctgaaagctctatttgtcagtggcagaaatattacaaatatttctagcatcatacagtttttcatatgcccttaagtagtttctaacattttaacatttttattcatatctcttaaaaaagaaaattttgaagagttccttttcatttatttacaatgaaatttggaaacaaaaacttattacattacaaaatctaaaataaagttaccttttttaaaaaaatggatcataaacattttgtaaaaagagttgaaaataatcattgttcttaagtcttactgctagaggaagttgtacacattaaggatgtatgtggcactgtttccaaaataaatgtatatttatgctacataagaccaagattagaccattgaagttgtaatgatcattctagttctcaaattcaaatgcaatttttttcaatacaaaaaagagactgtacaatgaaggaaaactcataatgcttttgactttaccagatgctagaggctactcaaaataaaggccagaatgtctccatatttagcgtagttcttctctatactcaacatacttgtagctgagttcatggtgtacatttttcgtgaatggttgtttataggatgtttatatattatcttggcaagataactttgaaagcccactgttttcctagcatttttctatggttgctaaacaatttctgcccaatctaaaaaattactttcctataccagcaggtggaggcaagagcagtcgaattgtagcactttgcttttcaagtgtactggcatgtattgtagattatctatccatgactcaaagtctctttatgacgtgtctctcacataattacttttcttcaacaactctgttgttgttttagcatcttcttttgattgctttattatttgctttatttacttggtgtctgggactgaacttagtggtcattttaggacagactaatttagattttcatcactttcctatactcattgattgaacagttaaaacatatatgttatatgctgaacacattcttccacatttgccaagaaatacaaaaatgactaagacatggaccacattcccaaagagcttacattctagtagaattacaaggaaaaatgtcttcaattcctctcctgacttggggaagcagatcagtcagccttgctggtatagctatggctagcattgggtagtaataaagctcagtattcacgtggattttaattccatcaacaaatatttactaagcaccagggactacattggggattaatttataaacataggctttttgtcttacagataaaaaaggccaaaacaatcttcaaaagaagtatcatttatttttaaacttcttaatacagattatatagaacaaatagttaaccgacatatagatcctgatgcattgcatttaaggaactttcagttagaagtaactgtgtgtaacattttctagaatatacttagaaaactttccacaaatcctggttgaaataaaataaaagtatgttactctacatcaattccattagctgtttatttgtagccaataatgataaaaaatatatacaaacagtatgaaagaggagaactgagttctaaggttatgtctgtatgtgcagaatgagagatggagaagaaactcatagttatggaaaacagaaaagaatggccccagaatttcttgcaagacttagcagccaccaatattcagaactgtctttaagccccaacctgtccatcatcttaatacattgtgcatcagaaatttccaacccaattaaaccatttttgtttccttcattggtttatttatgaaagtcactaaaaagacacaaatctggtctaacctattttagccttacctcttatccctccacatcccattaaacccgtgtacccaccttacctcatagagctatcttgaaagactcagccagtttagaagttacatcctcattgaagtctttcctagattccccaaggcagagtcacacacactgtcctcttcattctccattgccttatttatatagaatttgttacctgatattctgttatttcattattatttttagagacagggtcttactctgttacccaggctggagtgcagtgacacaattgtggctcactgtagcctgacctcctgggatcaagtgagcgtcccaagtagctgggactatagatgaggtctcaccacgttgcctaggctggtcttgaacttctgggctcaagtgatcctttctctttggcttcccaaattgctgggattacaggcgtgagccaccacacccggcctgctacctgatactctaatgtctctttccgtatttcttcctcacaagtctgtactctcctgaaaggtaataactttgtcttattcatctttgtaacctcagtaaatatttgctgaaggaataactgaatcaactatttcttgagaagtccttttataataagcttctctctccccttttttttttttttttgctgatgtctgaattatagtcataattccagatgatagatgatagtaacaagtcaataaatcctatcaatagggaataaagaaccagcatttattgcatagagtgttttcttaggatacctcagctgaggctgggcacagtggctcatgcctgtaatcccagcactttgggaggccgaggcgggtggatcacctgaggtcaggcgttcaagaccagcctggccaacatggtgaaaccttgtctcgactaaaaatacaaaaatttgtattccagctactcaaggggccaaggtgggagaatcacttgaacctgggaggtggaggttacagtgagccaaaatcatgccattgcactccagtctgggtgagagagcaagacttcgtttcaaaaaaaagagaaaagaaaagaatgcctcagctgaaccttatcaataaaagatgtagattatttgtttgagtactttaaggaagaatttgccatttcctgggagtacactgtttccaagtgatttattgattacctatgaacagttcattaaagggctctggaaaaaaatgagacctgggtgcagagggcagccatccaggtcttccatgtttgagtggttttactctttgagaacaggtgactaaaaagctgcccaagtctatgtgacctgtttttcagagctggatgaaagctaaagtggggcacttctccacagcccctgcagcaatctctcagggagtggtatagataacaagtcagacatgtgatgtaagcatgtatgctttaagtcaccttattctctccccattaaaagcaaagtacaaaatcagagaagtgcaattggtgagaaatttgatgatttccttttctgggatgggagttgcagcatcagtataggataataaagaataagggccctcagatacttttcagtttataaataaaaatacaaaagaatatgggctctggagtcaggcttgggtttgaatcccagctgcacaaatgctatgtgaccttgagcaagctacttctctgtagccagtaaattgggttgataatatcttcctcttggcttattgggaggattaaataagaacatgcatataaactcttggtgtagtgtcttgcaaaggcctgaggagagcttaacagtttgagggagatgtgaaagtagttcattatgtctggagcatagatatgagagcaaaaggatggcactgagaaagccagcatggtagttagggcagattcagaagtagtagcttgaacttgatcctgaagtcactggggaaccatgccattgaaagggagtgtcatgatcagatttatgttttaggatgattactctgcaggcaatctggagaacagattagaaagcatccagaacctcccgggtttctgatttggacaactgagtacatactggtgatcgtccttgagataagaaataaagaaggaggacagttttggttctgggggcaaggaagatgagcaatttaattttagacatactgtattaaggtgaccattgacatccaagtggagctacccaacaggcagttggtcatatgggtctagaactcaggagatttgtgctggaggtacagatctggaagtctttagctataggtgacatgtgtagccatacaaatggaacaggcatggtgtgcaagatgaaaagaaaagaggccatagaactgaatcctgaagagctctaaggaatcctgagaaggggctaaaaacaaaaacaaaacctaaaaaaagacaactgatgataaaaatcatgagggaacagccagagacatcaaatgaaaagaggaatcattatcacaaaagcccaaagagggaaaagttcccaaaaaagagggagttaaaaacaggaaagagtggaaaacactgtcatgtatcacaaaaagtcaagatgtaaatagtgaagaatgtctgttgcatttagtagaaatcactggggaccttggtgagagcagtttccatttttttatgagaccaggacccagattgaagtagggtgaagagtgtttgggacataagaacaaaaagatagtagggctggctggaccactttgaaaagtcttgaggatgaagggaaaggaagaaatagtggtgtctagtgggggacccaggatcaaggaagtttttgtttttttacttaaggtggagaaatgtaaatactccagcacatgtgtgtataaagaggcagtacaaatgagacatttaacattttgctgagccgggcgcggtggctcacgcctgtaatcccagcactttgggaggccgaggcaggcggatcacaaggtcaggagatcgagaccatcctggctaacacagtgaaaccccgtctctactaaaagtacaaaaaattagccgggcgtggtggtgggcacctgtaatcccagctactcgggaggctgaggcaggagaatggcgtgaacccaagaggcggagcttgcagtgagctgagatcgtgccactgcactccagcctgggtgactgagcgagattctgtctcagaaaaaaaaaaaaaaaaagattttgctgagagagatgatgtttcatgggtgatgtctctggaagagattggataggacccaagcacagagcaagaaattggctttaggcaagtcagatttgtcttatactagttaggagtaaagagaaatggatgatacagatgcagctatgttcgtaggagggaagtggagggaatttctgtgtgatggctttagtaatgtaggcagcaaggtcaactactgacagtgagaggagaaattcggggaggctggtcacagtttgaagtaataggtcatgggaggcagatgtttgtgggtggattttcctgaaggcttgggagtccaactcaaatcagaggccatgatataatagtatcaaaacccatagctctgttcagagcctgctatgagaatagagaaggtagctggttaaaatggtcctgagcagaggtttttaagattgatatagcagaaggactggaagttggggttttggtgagagatggttgacctgatagatgaagttcacttctaacagttgtgcaacctgaggtgaaactacaattggaagcccacccctggccccctcctgtaccatgaggggcctcacatgtgtacggatgcccccacctatatgtccaaactctgaccacactccctgctcttaatggccacacctcagtgcaagatatgtacaaaccaatggtgcagttcaccctcaggaaaatggaccctaggaaggggcccacacagattctgggagccatttgagcaagggattctggagtcttgtcacccaaagcacagttgcaggatgttagtggcaagctttgcatgagcacatccccttacctcatctgagctgagtgcagacacaggagggccagagtggagcctgccaaagtacagcagtcagccaggcgcagtggctcacacctgtaatcctagcactttgggaggccaagacgggtggatcacctgaggtcaggagttcaagaccagcctggtcaacatggtgaaaccccgtctctactaaaaatacaaaaattagctgggcgtagtggcacacgcctgtaatcccagctacttgggaggctgaggcaggagaattgcttgaatctgggaggcagaggtttcagtgagccaagatcgtgccactgcactccagcctgggcaacagagcaagagtctgtctcaaaaacaaaaacaaagtacagcagtcatccaggtcgaagggttgagctgtgggagaagtctgttagagtgagaaaatagagggattaaaggactggagttctaagggagatggaaaactaagaatcatgggagtagataaatggaagctgaaaacatagaaggttgtgattacagtggaatagctgactttatcatttctgaggagcatctccaagtggtggtaagaagaataaatacaaaggttcttggagtgaaataggttaaggaagtgatgttggctgggcacagtggctcatgcctgtaatcccagcactttgggaggccaaggtgggagaattgttgagcccaggaatttgagaccagcctgggcaacatagggaaaccccatctctacaggaattaaattagccaggcatgatggtgcatgcctatagtcccagctattagggaaatgggaggatcaagtgcttaagcccaggaagttgaggctgcaatgagttataatcacaccactgtactccagcctgggcaacagaacgagaccctgtcccaaaaagaaaagagagaaaaaagaaactgaagttaagggagtggtaagccttgtccacccatccttagagtctccctgggatgattatggaactttagacagggactgatatggtttggctgtgtccctacccaaatctcatcttgaattatagctcccataatcctcatgtgtcatgggaggaacccaatgggaggtcattgaatctgggggcagatttttcctgtgcttttctcgtgatagtgaataagtctcacgagatctgatggtttcataaagggcagctccctgcacatgctctcttgcctgctgccatgtaagatgtgactttgctcctccttctccttctgctatgattgtgaggcctcccagccatgtggaactgtgagtccgttatacctctttttccttataaattatccagtcttgggtatttcttcatagcagtgtgaaaatagactaatacagggactgtagagctaattctttggtgaatatgagaaaatggcaaagagtttagttgatgacagcaacaaagagagttagtaagggatgtagcaggaagccagtagcctcagaggattagaattgtagtgcagtaatgatttggacagccctttgaggatcaaggagaggtttaccctgtgtcaaggcctcctagtgtgaggagcctgagagaatgtcagtgcacttcatgggagaggcagtgcattcaccaggaatccaggttacagtgaagacaaagtggaaaagccagtgccctgtgacagggttgaggatgtagggtagggggttgagtgtccaagaaagagactggcatgatgggagagcttcaccaactggtgatgctgaacttttggaacagtggcagaatgtatgctgtgaaaggacacagagcagagagaaaacagtaagttcacaaatatttgctgtgttgaaggtctcgtactagaaacctttaggtaaacttttgtgacttctatcttagtaagctcagtcagtgaataagattaattctcacttgtaaaataataaggacatgaaatttaaacagtcttgtggaaaaaccatttttatattctaatcatattatcaatacccttggccctgctccctatggaaagaactgaaagtcttttctgccacactgtgctcttgaaagtagtgcttactccttatttctgcatgttgtgaggattagatgagtgttttaacactcctgcacacatgagctactcggtaaatgagttctcccttcctctgtttctctgtcctttcttccttccagagaagacacctaggaacctagtttgcgagtggaaaggagaaagggtacccaaggaagggcacaggcagggctgcttggcatacatgtgctgtcatgtggaatctcaggaatgggatcatccagtcagtgctgtccgttcgaactttctgcagtggcgaaaacattctctatctgtgctgtctagtgtggtacccacttactacaagtggctattgaatatttgaaatgtgcctggtacaactgagaaactgaattttttattttatttactcataattcatttaaataaccacatgtacctgctgtgttggactgcacaggtctagtggataatgtgctgcttggctgaaggcttcaagaaagaaatggactgagtacctgaggaaatagataagttggcctggcacgatggcccatgcctgtaatctcagcactttgggaggccaaagcgggtggattgcttgagcccaggaattgctcattatgggcaacatagcaagactccatctctactaaaaatttttaaattagctgggtgtgctggcacatgcctgtaatcccagctacttgggaggctgaagcaggaggattgcttgagtccaggaggtctagtttacagtgagctatgactgtaccactgcactccagcctgggcaacagagtgagactttgtctttttaaaaagtaaagagaaagagagagagagaaaaataaagaaaaaaagagaaataaggaaagaagaaagaaaagaaggaaggagaaagaaaaagagaaacaggtaaacctcagtgaggtgtgtagctgggatttggcattgtagaaatcagaaataaaggagtcctatatggtctgatgaaaggaccctggacttgagctatggcctgagaagttgtgaggagaggggtgatttagtcaaaacaatggctagaaagacaactttgtaaatggtagaaatcaggattagagtgtttctgatgtaatagccacacaagagaaataattaaacttatacaggaattccggtcttgtggggagattgatttaatgcagacctcaagagcagcttgtagagaaacattaattgcaaagcaaatactaggaatatttgccaagtgtttcaaagaattgggacaaatttctggaaatatcctgcaaaccatgtagtacaacacagtgacatggtgacagggaaagggatggaaaaaatgtaaattggtaggaggtagaagttgtaaaattttacataatatagtttcactatagccctggctctaataaaacgtgtttccctgtatgaatgtttacttgtgatgatgagggaagatggtgttgctttaatgtttttgtcatatttgtcccatcttgtttcaagtatataatgaacatctgtctgctcatcagtgtgcagtgcattggggtgggggtttgtgatgaaagaaatgtacagtggccattgtgcttgagaagtcctagtttcatttagaatataaaacaaactaattgaataggtgatgacagtaatttaaatgtctaaaatgaatggcacagatgaaaggtgaactggaatggtgaaagccttgatgagaggaagtagaggactttaaactatgcttcaaaagaaaatgaaccccataaatcaacatttctgaaagtacattccataaaatattttacaaaagtctcaaggcaataattaactcagaataactatggcatacttatttgtccaaatgaaattctgtaacctgatgatttctgtcaaaatttatccagctttcttcctttgcctaaacactattattatgatgatgatgatattattttggacacaggagattacaatgctagcaaatgcaccttcctgtcaattcccgtatggtattctgtattatttcttggttagaaatttcacagtgttggcctggtgcagtggcgtatgcttgtcatcccaacactttgggaagctgaagtggaaggatcacttgagcttaggagttcaagaccatcctgggcaacatgggaaaaccacatctctacaaaaagtacaaaaaattagccaggtgtcatgcacacctatagtcccagctacttggaaggttcaggtaagaggatcacctgagctggaaggttgaggctacagtgagccatgatcacgccacctggactgtagcctggctgagagagtgagaccctgtttcaaaaaaaaaaaaattcacaaaggtcatgttttgaaaagtgctttgaaaacagaggagacgatgaagaaggtatgattgagacagaaataataaagagcctggaattttgtagtaggaaaaagaaatctagtgtttaattagacaactggaatctcagatttgatctactttttcattttcaaattattagacgtaataactgctgtaggaaaagacaggctcatgccgtttgtctgcttttgacttatgtagctctcacttgcaaaaagtcagagaaaaatcttcaccaggttctcaagaatacaagtgcagctgctggaatgactacaggtgcactggttttcccacccaggtgcagttctttccagggctgcagaggcacggaaggggaagacgagatcaatgtaccagcatccaaagcattgggtgagcttgaaaatgtaacaaaggggaagaggagggatgctccgcaaaatgaagatgggagaggaaaagcagagataatgcagaaagaaagtactcagtagatcaaaatgttttagttagaagtataaggcattccgctgtcaccattccttttctttggtaacaagaactgtgaatcctgaaaagaattaaggtaaaatctcagaaggtgagaaaaaaagtattaagataaaaattttaatgtatttagttgacccatgacatcatgatttctagcttttgtttctgtctttttagcccttccaggttcagggaatagtattacattaagggagaaatagcttttcactagttgccttggaaactataaaacatatatgtgtccggccgaggtggaggtattgacatccttatcagtttaactttcccactacaaataaatgacaagtgtctgaggtgatagttatgctaattaacctggtttgataattacacaatgtatacatgtattgaaacatcgcactgtatcctataaagatgtgcaattattgtgtcaattaaaaacaaaataagacttaacaaacaatcagatatgctgtgaccactcagccttccagtaaatgttaggaaatagatgaaaaccaacgaaggtcatcttatcagtgaaatgcttgaagtaattttcttttaaagctgaataataggctgggcacggtggctcatgcctgtaatctcaacacattggaaggccaaggtgggcggatcacttccggttagtagtttgagaccagcctggccaacatggtgaaaccccatctctaataaaaatacagaaaactagtcaggcatggtggcacaagcttgtaatcccagctcctcggaaggctgaggcacgagaatcgctttaacctgggaggcggaggttgcagtgagctgagattgtgccactatactccaacctaggggatagagtgagactctatctccaaaaaaaaaaaaaaacctgaatattaatgatactaatggaaatttgtctatagtcattggtttatactaagaggagtggtgaaaagaacagggtgttaagatggatatgtcctatgttttagtcgttgttcttctctttcatattcatgtaactcagtcatctcagggccagcctttttacctatactgggacttccttgaagtacagcccgtcatggccatgactgactctttcttagtggcctctgttggcagaaataattattttggaaattttcagccaactgtataaatcctgaactgaacatctttattattttgcaccaacaccaagtatgtgagaccctctactcatctgccatttcttgtactctgacctccatactgttggtttctccctatacttattcctttatcagttttcattcctttatcagtaggatcctatatgaggcaaataatataaaaccccattctaactgatttcatcatagaggggacttactgactcataactggaatggtcaggctttacaattagttgatctatgggctctatggtgtctttaaatatttggtttccttcctttattctgccattcaaagtgtctgttttatcgtaaatcagattctgctcattctcataggatggctgccagctgcaatcaaggacataagtgtactcacacttagtgggaatgagacccccttctctcacagcattccaagcaagagtactgagggtagggacagctaccttcaaagaacgtgaactatgttgggggtgtatgagtgttgagaggaagatgtgcatataattagataggggaagaggttaatggctagacaaccatgtatatctaaccatctactgcactgacttctccattgttatttctggaacccttgtcctatggtaaataaactcctccactttttcatactattccctgaatcttcccttctcttcctgaccttttctaaaatccactgaaccctgacaaaaatgtttcccatgcatccctcttcctcccacaccccataccacaaagtaaggaggaaagatcagtatcttcttttcccccagaggccccctccaaccactgtgatgtcctgcacttcttcaccattgtgtaaaaacacctttgaggctcatcatctggttttcccattttatatcctgctcatgttgtctctcccagtcagctgagagttccttcttcagatactcgggttcctggttcagtcttcctttctactcccgggatccaccatcaacctgctgactccagtgttcatgtaggcaatttatccaaactagactcttgtttcttcacactcttgcaaagaaactgcttaacccttgaagtcttaaattcagatatctcacatttttactataacctgactactcccattttactgttttattgattttactaagactgtagtttttctgtctaaaacattgctcatgttttatattccatttcttcctatctctgtagggagctcagtctctctaaatatcttaataatgtaattgaaaaaaagtggtttcaagtagaatcataactatgataaatttcttacatattttgtggaaatttaaaacatatttatacccaaaacttttgatctaaaaccaaggccttttgctaactgtaaatgatttgattggcatttctcactatccttcttgtataaactacacctataatgcatcatctttgatttccagtttcagcttctcgaaagtggaacatgcgtataaggaaacatataagtagtatgaattcagaagccttctgaattgtcacaattcctttcccaatctttcataaggacaagttttttgtgggagttgatttttctgtaactctctttttaaaagtatttctgaaaccttttacctatcccagaaataagtttttaaatgttgtatacatttaatcagtcaaatatttaaattacatgaaaataagcataacaggcataaacaggttttggaacaacaggcttaaccattagttagcatataactcaactggtggaagaagaaatgtgaaaatgtattagaaaatagcctggcagcctggagttgtaagcatcaactagtatgtggacatgagttcttgtggagagtaagttgaagaggtcagtatttaggtctctcctgtgtgaaaaatgtatctattctgtgcctcagcctcttttagctacactgcgttagctctccttatttccacggccagatccacagagaattgcctaggttcacactctctccagttcttcacctcttccttattcctccatcatagtagtctgacctgtacccctgctgctcccctgacactggttttgccagagtcatgaatggcattctgctgctgtattcaacaaagacttttcagtatttctcaacatctgtacgtttgctgttgttttcactgcttgcttgtcacaaggtcctagaacccatattggcctaatattccttctccctcagtgatcatattagagttagggccccaatgcttttctcttctcactctgcaaactcccttgagtactcctataagtaaaattaccacttaatattaattcctcttacatgttctgtagccacttcaaacttggcatgtccaaaatcaagtttctcttttttcccccaaaaagcctcctttcccttgactctcttgactctctcacctccaccgcctccatccattcagtaccaaatccttttgagtcaaactcctgaatatattttaaatcattccgattcctcctatttcctagttttatatactttaatcatgagccccaatagctctaagaacaacttctctcttgaatgatctcttttacaaacctttcaactcattataatttgagtgatttctctaaaacacaaatctgttatctgtcacctgattaaaacctttctatggctctcgaattgccttcagaataagattggatgtttgggggagttttttgttgttgtcgttgttgttttaatgtttcgtagagacaatgtttcactattttgcccaggctggtctcgaaccctggaccttaagcaatctgcctgcctcaccctctcaaaatgttgggattataggcatgagccacggtgcctggccaaggttggatgttctgatgattcccaaggctcttcatttgctaaatgaccttacttaccttttcagccttctctccccttatggcattacctttggataattcctacacattgttcaaatgttggtttgctagttgctctttctagaaaatctttcttgacacattccccctgccccaagaccagaatggggttcccttcgtttggagttctctttgcttacacttgtcataacactcatctcagtgtagtataattgcatatttatccatttgtcctttctactgtattagaatgtcagggtctaagacaatttgccatttatccacattgcctgtcacgtaactagatacagtacatgctcataaatattagctgggtgaatgactttaaacaagtcacttagtctttctgaggcttcaattgctttattagaagagaatacagtaatgccctacctaccttataaggttgttttgggatcctgtaagataatagaaatgaagcttagcatagtggttaagagtatgggttctggatccatactgcctagcttttaatcctacctgtgaccctacaactagctgcgtggctttaggcaagttacttaacttctctgtgttttagttttctcttcagtaaaatgagactaaccacagtatataacttagagggttgttggaggactgagtgagttactacatgggaagtattttgaaccatgcctgaacagacaataaatgttagctactaaatataacatttttatttgtaagccctaaaattatatgtacttatatatatgtatatgtatgcatatgtatatagacagagagagaaacatggcatcagtattactagtttgaatgttttaagggagtaaagactggtatcattattctaaacaatttcttttttctttttttcttttaggataatggcatagctatcccagagtttattttccaagtcttaaattcaaattgtcattcttaatttacatgaaattttggttaaaaaaaattggtgttcagtataagaagagaagtttttaaatgtttcctcgctaaacttgcaaggttttttcgagtctatgtacatagtaggtgaaagttagcattggaaaaatattaaaataaaaaagatactggccgggtgcagtggctcacacctgtaatcccagtactttgtgaggccaaggcaggaggattgcttgagctcaggagttcaagaccagcctgggcaatatggggagacctcatctctacaaataatttttaaaaattagctcggcatggtggtatgtcccctgtagtttcagctacttgggaggttggggtgggagaaacacttgagtccatgaggtcaaggctgcaatgagctatgatcacatcactgcactccagcgtgggcaacagaatgagaccctgtcttaaaaaaagagggagggaagattactgatttaatttataaaggagaattattatagctccaacacctgactttatttatctatatgatttaattacacaaacaattcagtgtttgaattatacaaatttcattaaaactatgtaattatgcaagaaaaataggaaatacaggggcacttagttttgtgcatatgtgttcacctgagagtatttgcttgtttttttaaaaaggttctttttaatttaatatttaattttataatgcacattcatatgttgactttggaccaacagaaatccctaattcttattctttttctgattctttttagagttggtggttccaggattttactcagaatgacgttaggaagagaagtgatgtctcctcttcaggcaatgtcttcctatactgtggctggcagaaatgttttaagatgggatctttcaccagagcaaattaaaacaagaactgaggagctcattgtgcagaccaaacaggtgtacgatgctgttggaatgctcggtattgaggaagtaacttacgagaactgtctgcaggcactggcagatgtagaagtaaagtatataggtgggtcagatgcagaagcatatcagtgtttcactttgtggacatcttaaatcatttcatgctttctgtctttcagttttccagttttacaagcattgatttttacattataattaattgcttagaattatctaagattttaaaattgtttatgttgacaaaggtgctataaaatgtacactctgattacactgctctctggagagcattttgacaatgtgtcagaacttttaagacattcatacccttgctcattaattccacacctagacatttattctaagaaaataatcatatatatggaaaattcatgtatcaatttatgtataaataggtattcttgttatatcataggcttagaaacaattcccaaatgtcaactaatagattagataaataaattatgaaacatccatcctctgtaatgctgtataaccattaaaatcatggattacaagcagtatttaatgacatggggaaaaggacacagaagaactggaagaaaataaattttatcaatggttttgttaggattctctagagaaattgaacctatagggtgtgtgtgtgtgtctgtgtgtgtgtgtgtgtaagtatatatatatatataaacatatgtatgtgtggggagagagagattgattgatagattgattatagggaattggcttacatgactaaggagtctggaaagtccagaatctcagtgggggctggtaggcttgagacccaagagagctgatgttccagctccagtccgaaggccagtagcctagaggcccagaagaaccagtagtgcagaagtctggagactgcaggaggattctcccttgttcagggagtcttttaggccctaaactgtttggattttggctaccacattatagagggcagtctgctttacttcaggctcatcactctaacgttaatatcatcaaaaacaccctccaagttaacacataagattaatcatcagaatgtttaatatatcaggtgatgggtttatagctaatttttactttcctctttatgtatttctctattttctgtattttctgcccttacatacattatttttataacatattagacccttcaagttataaggagtgaagattccctttggttacctctaagggttggacatactttgtagaataattatgacagacaactttggctgtgtatccaggcttcatacaagaatataagatagctgcagaactggatattgtaaacattcgtgggcattttggaatttgaaagatcatcagaatccagcatagccctagtgacctggtcatctccttgcccccactatcccttcatcaccaagagttctctactctatgtttcactgtaaaaaggacttggctattttctcttatctcagtgtttgttggctattttctcttatctcagcatttgtttcagtttctgctcctactaccaactgcttcactttcattaatggcttctcaatcttattacacgtcttgaatttaaactcgtgaataaaaagatctggttgtcttcattagtcaaagtcaaagggatagagttagtccctattcagtagagcttttctagctggcaacttcatgtgcgtgtaccatcctggatgtggtttgtccttggttcaggtgctcacttcttcagtcacttgtggccaagatggtataccaacccataacttaggcatttgagacaaagtctcactctgtcacccaggctggagtgctatggcacaatcctagctcactgcagcctcgaactcttgggttcaagagatccttctgcctcagcttcctgagtagctgggactgcaggcatgtgccaccatgcccagctaatttttacattttgtgtggagatgggatctcactatgttgcccaggctggtctcatgtatgttgcccactccttgtctcaagtgaaccttctgtcttggcctcccaaagcactgggcttacagatgtgagccaccatggctggctcaaacaaaatctttataaaataattactttaaattgtttttctctcaatagtagatcttttcagcatactttcaagtttgtgatgtttgttcttgctcctctataaatttatttttgtgggttaattatcaaaatttttgagtttaggaatagatttcttaaaaactaactttctcttatctgggcatattctctgagtccattatgcctctcacagtagctgttgaaaccttgtttgtctagtgtcaggcactgggcgtcagcattgtctatggtttggcagtgagagcataaatctggttccaggtctttgtggcaaagtaaggaaggaaatggctttcagcacctttgtttgtttaagaatgtttctaattttaggctcctgcatttgatgttgcttatataagtttatgagcaatttttattccttcttaatatatttcatagctaatttattttatttttttattattattattattttttgagatggagtttcactcttgttgcccaggttggagtgcagtcatgtaatcttggctcactgcaacctccgcctcccgggttcaatcaattctcctgcctcagcctcctgagtggctgggattacaggcatgcaccaccgtgctcagctaattttgtacttttagtagagacaggatttcaccatgttggccaggctggtctcaaactcctgacctcagatgatccacctgcctcagcctcccagaatgctgggattatgagcttgagccaccgttttatagctaatttttaaaagtaaacatattgcaaccatatagttaactagtatcacttaaataagtgctgtattaaatttcaaaattttctattccattctttccttaaccgacagacataaaattattattaaatcctaaaagcataatttcataatttgatatttcaaaaatataccttatggatttattctgatatttgtggcaggtatttctaatagctttatttgtaacaatgttttaggaggactgatacgagtgtttaactgtataatttcttgctgtataaaggatagctctactgtctactatatatcatatggaaattttactgtttataataccttcacaatactgaagttaatcaaataaaaatttacttattttcacagcataacacaaccatcactataaaccatacttatttttgttctatagtattggttatttcactgacatcagagatttttacccaattaaagttaaaatacaaattgatgaaaaacccaggaaccacctttaatatgtgaagattaaaccaaactaaattatcattattatttaatggactgtctccaatgtctggctacttgttggatgtgtccacttagatttctggggatcctttgaagttatctggaattttgaatgtttttatgtatgtgtgcatttggggtagggtccgttgctttgattagattttctatggagtctttatctttttatgtacccttttcccatcccagatcctaagaagcctcagtataggaactgtgtctttctcttcctgcattgccagttgataaattacaccctcaggctagatgcagtgattcatgcctgtaatcctaatactttaggaggctgaggtgggaggatgactttagcccaggagtttgagaccagcctgggaaatatggcaaaactgcagctctacaaaaaaatataaaaattagctgagtgtggtggtgcatgcctgtggtcccagatactcagtggtgttggggaagaggggtgctgaggcaggaggattgcttgagcctgggaggttgaggctgtagtgagctgtgattgcaccactgcactccagcctgggcgacaaagcaagaccctgtctcaaaaaaaaaaaaaattgtaccccagtatactttgataagtgctcagctcacatctttaccgttcataatgatgccagctggaacagccaaatcctatattagatgctttttcttggtagccttaggaggctttacagaaagtataaaataaaacaaacttttattggcatgatcattcatctgggtatgaggtatttggcttaatactgatttgacaagtcctgttgtgtggtgatagtttttttctccatctgcagtggaaaggaccatgctagactttccccagcatgtatcctctgacaaagaagtacgagcagcaagtacagaagcagacaaaagactttctcgttttgatattgagatgagcatgagaggagatatatttgagagaattgttcatttacaggtaagtggtgttataaatccctttaaagagggaaaaactctacaacaaaaaagaacattcagtcataaataaaacatactgactggattttcttagcttttgtttcgaatgattataaaaccataatgggcattatatagtattacataatgttaattatatcgttgaggttatgttgagctgctaattccattcacttaaagaccaaatgtagaagagtgaacatctgtaaagttaaggctttttaataacattatgaacttgatggttacatgtaagggttatcttagaccaaatcaattagaagcaaatggaatcaagttgtttatctgtaaatatctcgtggttttggaaccataatattgatgacatactgttgatgctgtatgccggagtcattcctgtctgtcatccttacatttttcaagacttggggaaattatggataataaatgttctaggtgggtctgtccaggtgtttttgatctttttaccaatgttgatttgcctcctagcagctttcaatttttattttcatgacacttcagcaatttttttggggaaaaaaaacagtttcaaaattccaggctttttttttgtttaattttgcatgtttctttctgcagaatcctaattactttttcctttttagcagaccgtgacaagagttggaatatttaatattttaaattaaatagcattttaatttgtaactcattatacaatgtgtcatcaagatttagacatgtaaaatgtatatcctattttctcatatcagacaagcatttttcatcctataattgataatcatataattcataataattcacatttggtctataaacttcatggtgaaagtaagttatgaaaataactttatgattattcttcattagctaaattgttcttcttgctccttttgaccacagttatttgatgtgatttgaatcatggtctttatagtctcctcattttatttcatccccaaattacatttctttgttgttctattttttttatgtaatttggaatttttcctagaatttccagtttcctttgattaatcctattttcatcatgatttctaagttcttatttggaataatgtttttgtttttatttcacattctgtgattcttatgaatgttatcaagatatgaaaggtttgtcactttacatttctttgtcatagagtacttttaaattttgtgtatttgagaccagcctggccaacatggtgaaactccatttctactaaaaatacaaaaattagccaggcatggtggcaagcacctgtattcccagctactcaggaggctgaggcaggagaatcacttgaacccaggaggcagaggttgcagtgagctgagatcatgccactgcactccagcctgggcaacagagtgaggctccttctcaaaaattaaaataaaataaattttctatagttttgggattgatcccactaaacttgggaacaaattgctgactctagagtagactggcacactatagtgacctgatagacaccaatgcgttcatcagatttgtgtctttatttgagctggttcatttcgggcctttattttaacaatttaaggtaatttcagatttggttctgtaattctggtttctataatttttattgtgtgaacattttttaggggcttctacaacatttgctaactctacatcaggataataaaaaataactattgtgtttgtttttgcattgaaggtcattaggtgaatttacctacctttaaacatcttccatgacaaatggttatgtttatttaggcaatttttttaaaaacctagaattaccagtattagttctctgctggagttggacactttaataaatggtaaaacttatcccattcgtacctaaagggcaaaatcagatatccaaatattttatttattttctctgtgatactgtaagttaaataggatagccatgatatagcatataaagccttcattaatggctgggcatggtggctcacgcctgtaatcccagcactttgtgaggctgaggcaggcagatcacttgagctcgggagttcaagaccagcttgggcaatatggcaaaaacccatctctacaaaaataaaaaatagtggccaggtgcggtggctcacgcctgtaatcccagcactttgggaggccaaggcgggtggatcacgggaggtcagaagttcaagaccagcctggtcaacatggtgaaaccctgtctctactaaatatacaaaaattagccaggtgtggtggcaggcgcctgtaatcccagctactcaggaggctgaggcatgagaattgcttgaacccgggaggtggaggttgcagtgagtctagactgtgccattgggctccagcctgggcaacaagagcaaaacttcatctcaaaaaaataaaaaataaattaattaattaaaaatagaaaaattagctgagcatggtggtaagtgcctgtagtcccagctactcgggaggctgaggtgggaggattgcttgtgcccaggaggttgagactgcactgagcagtggttgtgccactgtactccagcctgagtcacagagtgagaccatgtctcagaaagaaaaaaaaaaaaatccacacataaaggcctcattaagctggataaataggatcttaaatttatatgatgtcagcaatttcaggcctgctctactaaaattaggatgctctgaataatattcccaagacaccaataatatatgtaataatcaaatatattatcccaattggatataaaatgttattttagctctttttattttccacttaaaattaatacatagaaaagtgaaattacttttcataattcttcatgcaatatgggctccagttatctattgatgcataacatattaccccaaaccttagtggcctgaaatagcaaccgtcattttcttttctctcacagtttctatggatcaagaattcagaaaggaattagttggacagttctgacttggggtctgacatgtggtttcaggcagtggtggcttgggttgaagcaggtaggaactaatcaggcatctgtctttattcatgtagtctcaaggtgtctgtatttgtccattttcacactgctataaagagtacctgagactgggtaatttataaagaaagaggtttaattgactcacagttccacatggctgggaggccttaggaacttacagtcatggcataaggtaaaggggaagcaaggcatgtcttacatgatgtcaggagagagagcacaggggaagcaccagacacttatcaaacaatcagatcttgtaagaactcactcaccatcacgagaacagcatgggggaaaccaccccatgatccattcacttcccaccagctccctcccttgacatgcggaaattacaatttggattacaatttgacatgagatttgggtagggacacagccaaactttcatcacacccccagcccctcacaaatctcatgtccttttcacatttcaaaaccaatcatgcctccccaacagtcccccatagtcttaattcattccagcattaactcaaaagtccaagtccaaagtttcctctgagacaaggcaagtctcttctgcctatgagtctgtaaaatcaaagacaagttagttacttctaagacacagtgtgggtacaggcgttgggtaaatgttcacattccaaatgggagaaattggccaaaacaaaggggccacaggccctatgcaagtccaaaacctggccaggcagtcattaaatcttaaaactccaaaatctcctttgactccatgtctcacatccagggcgcactgatccaaggggtgggcccccatggccttgggtggctctgcctctgtggttctcaggttacaacccctgtagctgctttcacaggctgatgttgcctgcagctttttcaggtgcagggtgcaagctgtcatgtggatctaccattctggagtctggagggcagtagcccccttctcacaactccactaggcagtgccctagtggggactctgtttgggggctcctgtgccacatttcccttccccactgccctaacagaggttctctgtgaggtctctgcccccgcagcagacttctgcctggatatccaggcatttccatacatcctctgaaatctaggaggttcacaaagctcagtttttgtcttctgcacacctacaggcccaataccatgtggaaaccaccaaggcttggggcttgcgtcctgtgaagcaatggcctgagctgtaccttggccccttttagcccagctggagctggagcaactgggatgcagggcactatgtcctgaggctgcagagagcaggggaaggaggggggagcacaaaaccattttttttctcctaggcctccaggcctgtgatgggaggggctgttgtgaagacctctgacatgccctggggacattttccccattgtcttgggcactaacatttggctcttgttacttatgcaaatttctacagctggcttgaacttctccccagaaaatgggtttttcttttctaccccatggtcaggctgcaaatttttcaaatgtttatgctctgtctttcctttaaacataagtcccgatttcaaaccatctctttgtgtacacacatggctgtatgctgttaggagcacccaggccacctcttgaatactttgcttagaaatttcttctgccagataccctaaatcatctctctcaagttcaaagttccacagatctctagggcaggtgcaaagtgcccagtatctttggtaaagcatagcatgggtgacctttactccagtttccaataagttcctcatcttcatctgagaccacctcagcctggacttcattgtccatatcattatcagcatttttggtcacaaccattcagtaaatctaggaagttccaaactttcccacatctttctctcttcttctgagccctccaaactgttccaacctctgcccttgacccagtttcaaagtcgcttctacattttcagtttgtctttatagcagtaccctactatcctagtaccaattctctgtatcagtccattctcacactgctataaagaatacctgagactaggtaatttataaagaaagaggtttaattgactcacaattcctctgggtgggaggccttaggaacttacaatcatggcagaaggaagcaaggtacatcttacatggtggcaggagagagagtgaacttaggggaagcattagacacttataaaacaaccagatcttgtgagaactcactcaccatcatgagaacagcatgggggaaactgaccacatgatccaatcacctcctaccatgtccctccctcaatacgtggggattaaaattcagattacaattcaagatgagatttggttgggccacagccaaataatatcagtgtcttagttagactgggctgccataacaaaataccatagactgaatcctttaaatgacagaaattaactttttcacagttgtagaggctgcaagtccgagatcagtgtgccagcatggttgggttctggtgagagccctcttcctggcttgcaaatggccccttcccttccctgctggcctttcctcagtgtgtgcacatggcacgggttgggaggtggggtacaggaaggcgaggggagagagacagggagaactctccttctcttcctaaaaggccacaatcctgtcagattaagaactgcccttctgacctcatttaaccttaattacctgccaaaagcctatttacaaatacagccacattggggatagggcttctacaaaagaacttgaaagggcacagttcagtccatagcgcagagcgtctccatgtggttcatttgtgtgggttaatttgggcttccttacagtgtggtggtatcaggatggtaggacttctttcatgagactcagtgctccaacatgagtgttccggcaaggcacatagaagctactttgcacttatgtgctgtcacggaagtcacatgacatcacttctgccataccatatgggttgacaagtcaccgcattctgcccagattcaaggaacaccacatctcagtctggggagtatcatttaattggcagtcatgtttcaaaaccttcaaaataggggaggaggtggggatggttaatgggaaccaaaaggaaaaacaatagaatgaataagacctgctacttgatagcacaacagggtgactgtagtcaataatgacttaattgtacatttggaaataacaaagtataactggattgtttgtaacacaaaagataagtgcttgagggaagggataccccattctctgtaatgtgattattacatattgcttgcctgtctcaaaacatttcatgtgccccataaatgtatacacctaccatatacccacaaaaaatttttttaaaaccttcaaaacaaataatttgttgattaaatggatggaagaaattacagtagaggataagactaaccggtgtgttgtggtcctctccctcccagtgtatgactactaagactgccttacatttgtgtagcaatatgactcatataaccttgattccaatcttatgagataggcttttttataatataagtggagaaactgaagctcagaaacaataactttccaagagccacatcactggtgggtaagtgcttgccagaaaccatgtagactgtttgttaaacccttcaagggagggaggtatcatgtttgattctattttgcacctctggcagagtgcctgataaaaagcaagcattcagtaaatgttcatcaaactaaagtgagaaaccagttagtggcagatccagaaaataggccttcggtaattgctgggacataagttacccatttggaaaaataaaataaaattgaatgtcttcctgacaaccaactgaaaagcaattcctgatggattaaagtcataaaagactagagcttaaagcttctagatgtctgtacaggaagatatctttatgatatctgggcagggatatatttattaagacgcagaaactgctaactatgaaatataaggctaataaacttgactatgttaatataacttctattcataaggaaaagtgaaaagagttcaaatactgagaaaataactttacaaaacatgaaaccagtgatgcattctaggatatataaagaactactacaatcaataacaaagaaacatcccagtagaaaaatgggcaaatgatatgtagaaatatttcaacagaaacgcacatagcaatcaaatgtatgaaaagatgttcaattttattagtaatcagagaaatgcaaatgaagaccataataagttaccattcttcactcacaagattggcaaagattaagaaaaccaacaatgccaagttatctttgtggatatggatcaacaagaatgtttgtgcactgcttctaagagtataactgattcatcaccaagttggagaaaaacttagtattagaaagttggagcttacattctccacaacctagcacatcctcccactcccacctcagtatttacctagagatacctttgcatttgtgcaaggtaatattgaacaagtgttcatagcaactcagattcccatcagcaagaaaatggatctataaattgtggcacatttatgcaatggaatattttatagcattaaaataaataagtataacaacatggaacaatatagttgaatcttagtaaaagtgaaggaaagaaactgcagaatactgcatacaatatgatactttataaagctcgaaaagaagcaaaactatacaatatataagtggtaaaactggaaaaaatgtttgtcacaaaattcaagagagtagttattttttgcacaggttacctgttgcataagtaaatgcaacggtattattaatgtcctattttataagttgaagggtggatttaatttgtcctcactacatatatatagttatatccatttgcagatatcaggttacacataaaaatttaacatatattaaatgtatccttaattccactaagaaaaaaaaagagaaaaagcagtgaaaacaaggacttcctcatccttttaagctaaaaaaatggccaagtgtcagaagccagcaattatggctgcaggtattagtatttcccaattctgacaagggcttctcaattgttggcttttaaaaagccaacaaacatccaagaagatttcatacctgctctttccagccattttggcgagaaaaatgtacagtgtcttcatgtcaaaacaatcaggcatattctattccagtggcctgctaaggaataaatgcacaagaggaattctttcatgaaatagaggctgaattatgcaagctaaatttgagaagtacagtgatctattgtaatattgtttatttattttttttagagcggcaggctttgatcttgccaattcatcttagccaattagtgatttaaataggaaagctttaatgttacagtgcagatgaataggtcatgagattaagtatatgattttaaacattatgtaatctctcctacttgaccagccatggagacccagctccaaattaaaatacaagaaccagaaccgaccgggtatagtggctcatgcctgaaatcccagcactttgggaggccaaggtgagcggatggcctaagcccagaagttccaaaccagcctgggcaacatggcaaaaccccgtctctaccaaaaatacagaaattagccagtctcataacccagtctcaaaataaataaatgaagagataaaaattttaaaattaagtttaaaaagaaccactaccttaaaacaatgacaaaaaaaaaaaaaagatatcccaaattcatttacaatttcattccttttattttccatgtcttcttgatttttgaaatatgtaagtgtagtcattggtcataatcaatactactaaacttacaatttttttggggtcttaaaagcctagggatccagatataaagcatcaattaccttggcttagtttccccattggctaggcatccttcttttgtgcccctcttttttccaagtacttacctattttttaacatgatgtgtgatattgatgttatctattaatatgtctttcttttccttcatgtgacttaaagctcttcaagaatattcctttttgtttccttagtgccaggaataattaggagctcagtaaatgtaaatgtgtgttgaactgaactagccccaatgaaaatgtatcttcatgcagtgtgatgcctcacttcagcaaccttacgctgtggctcacacagaagcagtgaatcttgcgatggcatattgaattagtagtcagcaagcagtgctggctgtatccccctagcccaggagtgcagacaactacctaagaatgtcctcttcaccatgtagtaagatagcaactttatagtaaatgtcatggactggggcaggggcaagagggagcagaagaactaaattacaaatataatacaattagttatttctctattttagtttaatttttttggtttgggtttttgtttttttggttttggggtttttgttttgttttttgtttgtttgtttgtttttcatttttttttttttagaaacagggtctggctctgtcacccaggctggaccgtagtgacgtgatctcagctgacttcaacctctgcctcccaggctcaagtgattctcccacctcagcctcccaagtagctgggactacaggcacacgccaccagacccggctatactctgttatcctattataattccttagcaaattcaaagttcctaattcttttttgttttttttttttttaaatgagcagggtctcacgctgtcaccttggccagaatacagtggcacagtcacagctcactgcagcctgaaccacctgggctcaagtgatcctcccgccttgtcctcccaaactgctgggattacaggcataagccaccacacccagccctgaattctattttttttttttttttttttctgcaacaggtcctcactctgttgcccaggctggagtgcagtagctcaatcttggctcactgcaacctctgcctcctgggcccaagcaatcctcccacctcagcctcccaggtagctaagactacaagcttgcaccaccatctccagctaatttttgtgttttttagttgttgtagagatgaggtttcaccatgtttcccaggctggtgaactgagctcaattgatccacccacctcagcttcccacagtgttgggattataggcgtgagccactgtgcccagccctgaattcattttttaaatgatattcagagaaatatactatcttaatctccatagttcttttaacggcattgtaatttctcctttgtataatacagaaaatcccactggaataattttttatttatagattttagaaacagaaaatataaagttcttgtgaagaaaaagacaaagtcatgagacggaaggtggggagggtttgggggaaattaagaaactcaatatttggccaggcacagtggctcatgtctgtaatcccagcaggttgggaagccgaggcaggtggatcacttgagctcaggagttttagaacagcctgggcaacatgattaaaccccttctctacaaaatatacaaaaattagccagatgtggtggcatgtgcctgtaatcccagctacttgggaggctgaggtgcgaagatctattgagcctaggagttcaaggctgcaatgagccatgatcacaccactgtactccagcccaggtgacagagtgagaccctgtctcaaaaataataataataatcaactcaatttttgtgataaaattttaaagaatgattaaggatggtaatacagtagtatggtacattgggaaaaacattaaaatagaattcaaagttttttttttttttttgctgtttttaaccattagatagctatatgatcttgggaaaatcatttaacctcagttttcttgtctgtaatatgagtatataatcatacttgtgagagatgcagacagggagagagaatacacattcatattaaaactctttgttacaggaggaagttagcggaaaattaaatcttgtcaccacagagactaaaataaggttccatactgtcagatcatataaatttaaaaatcacttctaagaactttagccttctactctataagcagaaaaacttcacctaaagaggcccatggcctggctgagattcaaggggagaaatttttgttaggaaggaaggtgcaattacagcaagacagtctagaagtgttggctgattccctcttagaaaatccttgggcagtaattctgaccttgcctggagattgtaagagaatattactatgatcagctctgggataggaatgtgcttaagtagcacattttagaagtgccttactcctaccaaagaactctggggatttcccaagacctgtgtctgcctagcaaggagtgtctggttataatagtcagatttctgttgtgtcatttttgtggtaagttaaagatttcattacagttaattagtcatacatatataaattatatatatatatatttttttttttttttgagacagttttactccgtcacctgggccagaatgcagtggcacgatctcagctgactacagcttccacttcccgggttcaagtgattcttctgcctcagcctcccaagtagctggaattacacacacatgccaccacacccggctgatttttgtatttttagtagagacggggttttgctatgttggccatgctggtctcgaacccctcacctcaagtaatccgtccaattcggcctcccaatgctgggattacaggcatgagccactactcccagcctaattagtcatattttaattagacctaattccgggctgatttttctcagaatatccttctacctgtttgcacctgtgtcatttattttgggaataagtagttttaactttaacatagactatgagttttgagttcatatcctgaatgtattttaggctttctgaaagagcagccctgctacatgctgatatggcagattgcagtctacctagtatgagagcccatcctcattaagcatagccatagggtaggaattctgcattcttcagctattgaggctttgtcatgagtctgtgtcctgagctcatggccaaatgtggcccaggaacccaggtacacacacggctgtccccctgtagccttagcttctcgctggctcctttccttgctgggatggccttctgctctggtccttagcctgctcgcctgggtccttaacaacttacccagctcttgccaggcccttctcaccagggattcctcccaagtcccctgcacataactacagcctggattctccccagctctacagcttgcagtatcacactgtctagagactcctgttgctgtgcttcacactacaggacagacttcctggcgctactaaaggcagcctagatcaacccaagttaatcacatccgcaggaacactgtgattggagctgctggccacccctgagggaaccagcccatagcccagttatctccctggccattgtgggtttcctccctttgcaggcacctgctgctagcatcccattgtgcactgatactagctagggagggttccaactccagtcatgccagcatgcacaaattctccagggatacaaagggaggttgctgtagaaaaaggagcctaactattttctgcctccactgaggataacctcagagtaaatatatgcacaacaaatgccttagtactgtaacataaaattatttgttggccaggcatggtcactcaaacctgcaatcccagcactttgggaggccgaggcaggtggatcacttgaggccaggagtttgagaccatcctggccaacatggcaaaaccccgtctctactaaaaatgcaaaaattagctggacgtggtggcacatgcctgtgatcctagctacctgggaggccgaggcatgagaattgcttgaacctgggaggcggaggttgcagtgagctgataatcgcaccactgcactccagcctgggtgacagagcaagactgtctccaaaaaaataaaataattttttagcaggcaaagtgagatacagttggctgtattaagtagtatttagttaaaatacaactctgttacctgctgcaacaaaagatatacaattacagaattattgcagcacagatctagcaccaacaatctaaaatgcagtctctaagctaaacacagtccttttacagatttaattagttgggaaattagggatgctcagggttgaacagcctgggtctgtcatggagagaatctttaaccaatagaaggcctataaggctttagaaacaagtccctcattggctttcaaccaaactgaatccattacacctgctgaatctgtccagagtccatttcttcttaggaaccactaactacccagccatccagatgtgccatgtgtattctgccacctgctttagagaaacatctggtgtctttattaccttgctgtggctaggggagttttccattcccctccatggccctctgttcttttgagtgagtgttgtttgtgctgctgcatatagattcaaatttactgtccagctttcctccactttgtgcagtgctgactcattttccccagatacttgttcctatgcggcttgctgtagtcccttgatctctcttggcaaatgacagtaaggcatttttgaagtgttggaaggcttttgctcgggctttatccagctctccccgtttggtatattggcaaaagagtcccactctgcatttgtgtagaatttacccattatttctattcctgcctttcaagtaggaaccaggttagcaaatgatagaaaattaaatccagatgatttgtggtaagaaatatgttttgtgaaaaagaccactcagtcataaagaatgctcagaattagattatgcaaatgctctgttatcacactttcaagtggtacaggcactgctgattttgattcaaggcaaggaaattctagttagctttttatttatttaatgtttctgttttaaatgagcaggagctcactaaagtataaaagaaattaggtcttcaatagggcctgcctcgtaatcacctatgtgcttcataacccaacggagatgatgaataaatttgctgtggcctcatagtttataatttacctgtgcactgtttcaaccgaaatggttttcatgctctttaatttcaggaaacctgtgatctggggaagataaaacctgaggccagacgatacttggaaaagtcaattaaaatggggaaaagaaatgggctccatcttcctgaacaagtacagaatgtgagtttatgttttcttttcttatcagaaaaaaaaaatgaataaataaaacaaaatactggttgaacatccctaatccagaaatccaaaatgctccacagtctgcaacttttgggtgccaacatgatgctcagaggaaatgctcattggagcatttcaggttttgtgggttaggcgtgctctactggtaataatgggaatattccaaactccagaaaactccaaaatctgaaacgtttcaagccccaagcatttcggataagggatacccaatttgtgcaacaaaaaacagaaaatagggaaacagatgggttgtaatagaataacctgtaatacaatgtattttgtatttagtggttttaaattctacaactcctgttaacctcatggtgacagacaaacaactgataacttaaaattgttctttaaccttgtacaagttttatttatttcatgtgtgttgagcttattttcccttccctgttttacattctttaagagctgttctcaggtcttagtagttgatttgtcttttcactcccttggtcatacagagatggggcactgattataaaatccttaccgatggagagttttaaaaccagcaccttggaatggagtatcctatgtttaacacatgccccttaaaagatgagagattagctgctgaaagatgcctctcaaactttttcttttgtctaatgccagtcaagtcttccaggttcaaaaataaacttggctccagaattaacctttttcttcttggaaaggaaatatactccatgatttatttccaggtcattcttctagccagcaggactggaaataagtttggaagaaatccaaatcaagtgttgtcagcatgttagctataaccacaggcaccactgagatatgggtacctttctcccacgtaaagccctttgatcaccttgtatcctcttccttcactgagttagaggagaaatgtgattgatctcacttacctgaccctttgtcttcctggtcaattcttaattctgtttggagcatgaacactgtattagttaagatatgtttggttgcagctaacaaaaccctgtttaaacgagagatttatttgcttgtataactagaaggtcgaggggtcggtgagctgcatgggttggtttgatcctgatgcacagtggagtcattggccaactgatttttctatttctctactgtgtcttcctcagtgttagttttatctaaagggtggcttcctttcattcctaaaatggctataaatctaaaaactccaccatccagaaagacatagagaagccaccagtaaacctctcctcatgtcttaatggcccagagtggatcctgtggttaatcctgaattcccttttagtcaatggaatacgaggcctgggttatctgaacagtcctgagggcaatgggggtggaaggatggcccaactggtgtagaagtcacacacctagagttgcagataggatcaggtcctatgtgaactacatgggcgctgcaaagtggggcagaggtagaaagggggttgagggagagtatcggaaaacaccactgaacagtgcgttaggtcagtagtctcaaatttagtgtgcatcaaaattacacggagggcttattaaaactctgattataggactcgacttttaagagtttgcacttcagtaggtttagtgtgggggtcccaagaatttgcgtttctaacaacttccctggtgatgctgatgctcctagccagggccacactttgagaagcagtaaatttcattatgtaacattgttagaagaatgggacagattaataaaattgtatctttttttttttctggtggtttccttcttattgcttcatttgatctcccacctaatactttttatgcaaatcttagagtctataaatcatctttttttacaaaagctctataaaactaaaacatcaccttttccccgaagcaacaatagaatgaattattcagctcttatctcttggtttacttcataaccagatgctgattactgaattaaaattttgaattggaaacaattagaaatttgctaattggtaatgcactgctagatttattcattcactcagaaactatttattgtgtatgtactatgtgcaatatattgtgtttactgtacctcctaaatttattcttcaaattcacaactaatttccaagacaccaccaggcttgcctttctataagtgctacacacagatacacgtggacatgacatagtggactgcagaaacctgttttatcaagcacatctctacagaagtacttcctggagtttgggcacagaagtcaatcttcatatgaaagtgaaacttactcaattgatggtgataaaaatgagttgtttttttcaaacaattctcctgcctcagcctcctgagtagctgggattataagcacacaccaccacatccagctaatttttgtatttttagtagagactggctttcaccatgttagccaggctggtcttggactcttgacctcaaatgatccacccaccttagcctcccaaattgctgggattacaggtgtgggccaccgtgcctggcaaaaaatgagtttctttttattgctaatgccctgtatttttatcttcctttcaggaaatcaaatcaatgaagaaaagaatgagtgagctatgtattgattttaacaaaaacctcaatgaggatgataccttccttgtattttccaaggctgaacttggtaagttttattatttttctagattaaatcatataatttaggcaaatagtgttacctcacagtttgttttactttccagatacaaaatttctaaatcatagttcaaataattatttaaaaaatgatccagtacctaagtccaccaccccttctacagaagagacaatcaaaccaaccaaaattagattttaggctaatgagggtatataaaatttctagagacagtccagaggggacttaataatcttttttttttttcataatttttcttggtagtttatagttgtgtttaacagccttcagtgccttaaaatttttttttgacttgcattgtttcctgcattgtatcttaaactagtctcttcttactcagtcctgggtcttttttcttttcttttcttttctttttttgagacggagtctcgctctgttgccaggctggagtgcgatggcgcaatctcgcctcactgcaacctccacctccctggttcaagcaattctcttgcctcagcctcccaagtagctgggactacaggcatgtgccaccacgcccagctaatttttgtacttttagtagagacggggtttcaccatgttggccagaatggtctcgatttcttgacctcatgatccacccacttcagcctcccaaagtgctgggattacacgcatgagccactgtgcccagctttcctgggtctttcttcacttaattttgcctgttctccactgaaacatcatttgcacaagtttactgaaacctgttcatattttgaattgccgtctcccaaggcacctggcctctaacagccaccccaattccagcaacatcaaaatgatatttaaaggattgtcattattttacttgaatttcaattactacacaaaattcctagagctaccaaaaggcaccatgccaatactaaataaaccagcaatgagtggaaaatttgatatatgagaaaatgattttttgcaggtgctcttcctgatgatttcattgacagtttagaaaagacagatgatgacaagtataaaattaccttaaaatatccacactatttccctgtcatgaagaaatgttgtatccctgaaaccagaagaaggatggaaatggcttttaatacaaggtgcaaagaggtattataaatgtttgtctttcttttgtttttaatggaatattttaagaaaagggtttactttgttcaccagtgtcaaagtcagctcagagactgatattcctgtgtgtgcactgtatctctaattcctcagacttacaagacttttagctttttcattgctcattgacaacctgcttggtgtggtcacaggataagctgttctaataaaaatagaatggattaaataaattagaattctgttgctcctctcctaaatcaacaatccagcactggtaagtcctgctttaatatgaaaaagaaaaaaggaagaagtagacagggattctcagtcatctagccagttctaccgtgatctgcctctctagctatccaagtaaccatgaggacccttttttccttacataggacccattcaccatttgttaattcccagttactgcctgaagctcaaagaccaggatctctgggtgatacagttcttcctggttgtagcttctcataatccagcaaactataaaaggaagacaagttatcagctcctcacccccacaccctcccccaacactcccagtgatggcataggaaaagaataaccgcactgaaaagtcccatttggaaaaagaaagactgggaaacatagcaagctcatagcaattttctaaaattttcaaattcctcaggaactgggaagattctgtactatggtgacgtttcttggttagcttgttggactaaacttgggtctgctttctcataagaattcctttatcaattttactccatggcccccagttttgcccacagggaattgtttttgtccattatccttgatgaccatatcttgggggactgctggtcctgctaatgtcaggtagaatcccaagggttgctttagggatcaaataatccaaacttttgtaggccagacttacgatatctttggtaatacagcctcctcaaaaatgtaggtttgttgtctgtttgctgctaatcagatgcatgtcaaaataactatacccaaatatcacttttggtcatagttcttaaacttgccaaatcttatatactgtcttctgaatttatccatctcactcttcctccatttaatgaagtctgctttcaggccctctgaacatagtgagcttgtggaggaaggcagcattctcaaattcatgtctgcagttcagtaactcggagtgacagccttttctcttaacactaggaacacagagcaattggcttttccaaccatctgaagattgtaggccataggcagaacctccctgagcagaattcttttccttccatctttagaaactggccaattctcacccaagcttatctctcccatgtaatctttcaaaaagcaacaaatgccaaaaaaacacctcccaacagtattagctttcccaaacaattcctctaggctaagactcagtaggtacatggcctgctgtctgagttatggcaagcaacagttttcacaaatgcccatggtataatgagaacctgcttcccagcctgcaatgtctgggtccttaccttccattcctgtacatttttcatttttattgttagtaccacccaatttctggtattaatctctacatatgttagggtccaggctaagggacttgacagaagtcaaaagcacagttaactcaaataagataaaagttttatctttccagaaagtagattagaggttaccagggaatggggagagggaagactgaggagttaatggttacagagtttctgtttggggtaatggataagttttagaaacagatgatggtagtggttgcacaatagaatgagtattattgccgttgaattttacatggctaaaatggcagattttaccacaatttttttttaaaagatttgtcttataactgtaagtcaagaggtgagtggtccagaggtggaagacagctctaccatcctcagggtgtggctttcagggtcattgaggtcatcttcagttcacagccagcaaggcaaagatctatcagacatgacccagaaatttcactcatcacttcattcacatcccattgtcccattgagtatcacatggccacagctggctttgaggaaggctgggaaacgtaattaggtaaccaagtgtccggcaaaaattcagagttcagccaggcacagtggctcacacttgtaatcccaacgctttgggaggccaaggcaagaggattgcttgaggccaggagttcaagaccagcctcagcaatatggcaagacctcacctctatgaaaattaaaaaaaaaaaaaaaattcagagttatattactaaaagaaaaaatgagagaacagatattgggagaaaattggcagtctagagagaagatctggagaaactgcaaaaaatgaaagaaaaatctaattaaactatttaattttagaacttggagaattacattatgtatgtttctcttctatgttttccattttagttttaaaataataataattataacagataattatatagtgtttggttatgtgccaggcatttgtctaagcactttacatatattttcatttgaatcttcatgattactctccagtgtatgtatttttattttccacatcttgcaaatgagaaaactgagggtcagaaagctccagaatttgcccaagatcaggtaactagtaaatggtggaaccaaattttgaatgcaggtagtgtgacctcagtgtgtgattttccttagaaaccagtctataaataatttgctgatttgattattggaatcagttttttcttttactttaacatttacttacttcctctaggagaattacttttatttcattgctaagaaaataataaaataatatcaatttttgtatttttaatacaaataaaatataaaagatatttgtaatgttaatttgggaaaaatccctgaaacatttttaaaagcagaattttatggtgccttagttcatttgtgctgctataacaaaataccacagacgaagtaatttatgaacaatagaaatttttcacagttctgaaggctgagaaattcaagatcaaggggcatcggcattcagtgtctagaaagggccttttttctatatcctcacatggcagaagggggaagggcagaaaaggcccaagttctttagctgtagcccttttataaggcactaattcattggtcaattcccaaaaggccctgccatttaacactacctcaaaagggattatgtttcaacacatgaattttggggaacattcagaccatagcatgtggcattaagtatattcacattgagaatatgtttatatttttctgcagccatcacctgtatccacctgcagagttttttcatcttccttaactgaaactctacccattaagcattaactccccattatcccctatccccaggccctggcaattactattctattctgtgtctctgtgaatttcactactctaggaacttcatataagtggaataataaaatatttgtctttttgtatctggcttatttcacttagcataccttaaagggtcatccatgttgtagcatgtgtcagaatttccttccttgtaaaggcagagttatattccattgtatatatataccacattttgtttacctgtatatctgtccatggacacttgggttgcttccatcttttggctgttataaataatgctgctgtggacatgggtgtatagatctctcttcgagtctctgctttcaattatctttgttatttactgagatgtagaattgctggatcatatggtataatttttttaggaatcaccataccgttttctacagcagctaaactactttacattctcatcagcaatgtgcaagggttccaatttctccatttcctcaccagcacattttctatgtttttaaaaatagtagccatacaactgggtatgaaattaaaaagataaattttacgttatgtgtattttaccacaataaaaatgtccaaaggaactgaaagtaccaatatttggtgcagttctgtcagtagaagtaaatatggattcgctatattccttaaaaatatattttcactctaagtttgtagcacctacaattttattaagacctcatagttctgaagtttaaaaagtcataaattgtttcagaaataaaacgaaatcatgaatccaaaaaaaaaaaaaaaagcctataacaccaaaatggaaccagaaatttaaatggtctaaaaatatttgataattttacaaacctaaaaatacatacagtaattcttccttttagtgctttggatcaaattattgattagcctttattttgttgctgttgtttattactaggaaaacaccataattttgcagcagctactcccactgcgaaccaaggtggccaaactactcggttatagcacacatgctgacttcgtccttgaaatgaacactgcaaagagcacaagccgcgtaacagcctttctaggttagttcttttttttttttctatgactgttttgctataccatgtcaaccagacagaaggcctcagaacataatatgcctttgaggacatcctacttttccttcatttgagagaagtatattgatcacctattaagtgttagatagtgtgcttggttgtagggactgcttattgtttatattgctagtataggcctggcttcactgtatcttatatcttctttaggctttttatactaattcctaacatgacatgtaggttctaacagagagttactaaagttactggctttattctcttcactagggatttagtagtcatagcatggctgcttatgaatttgtataaaataagctgacaaatatgacgtacataaaaataaaacatacataaacaaaaaacatttaatattccagaaaccacttgttaatatacaaaactaatataaaataatatacataaaactagtatctaataactaatataaaataatatgtataaaaactgttatctagtaactataatgttaaactccataaatggtacatatttgtttttgtataattcactcattcattcatgagacgtttatgaaataactattcagccttaggcagtatgctaaatagtaggattacagaaaggagtaaaacaaggtccttttggctgggcatggcagttcatgcctgtaatcccagcacttcgggaggccgaggtgagaggactacttgagacccagagtccaagaccagcttgggaaacaaagagaccccaaccctgtctctacagaaaaatttaaaaattagccaggcatggtagcacatgcctgtaattctagctacttgggaggctgaggtgggaggatcccttgagcccaggagttcaaggctgcagtgagccatgatcatgccactgtgctccagcctgggtgacagagcaaaatcctgtctctaaaaataaaaataattttttaaaaagagacaaggtctttttctcaatggatttgtcacttactagaaacaacagaagtgtgaacaggtaattactctacagtctgatgcatggtatacaagaggatggctcagagagttaacaggtttgtaaagaatgtttccttcagtggtgattgcatacactaaaattttccttagtaaccacctgattaacttaattcatttaaaggagttttccttctaatttgagattggcatattcctatgcaaagtgtcctcttgagaggctaaagtgcgaggatcccttgaatctgagagttggagtccagcctgggcaacatagcaaaactcactcactctctctctctctctttatatatatatatatgtatgtgtgtgtgtgtgtgtgtgtatacatacatgcgcacacacagacacatgcacgcacacatgcacatggatatatatatggaaaactatatctttgtatcctccatgagtttcctcacttctcttcacggtattcctcgggctgctcctccatctctcacattgtgaggttgccttctgaactgccatgtcctttgcagagccaggcatgtttttatcgtaacgtatgtaacaaaatgtaaaaaataaatacataagaccatactcatttatccaaatacagtaaagtgaaaaattgaccacagcaatataatttgtggttctcagaagtttctccagctaaaaactggaattgctgtgtccagataaaccttcacagaaatggggtaatgagaaactaaacccagtgataggaatttctagataacattgaccacaggtcacatctgatgtgttttccctagctttcttaggagtctgactgtcttcattgaagaataatcatgtacatgactttagtttcactagtgcttttttccctgaataacattcttcagtcagcgttctctgagataaacttgagctttggtgatgaattgaggaactcatggcccagttctgggggtgttaaaagaaaaaggggctaggaccataaaatcaataaccccgaagagcaaagtgtgcttccataatacagcctgctttcctccctcacgtttttcctcctcctttacctctttccgccttatttatctgtattgagtactgcaaaggaggaagcaccatgctaaaacacaggtggtatttatgagtatgcttgcttccaaaagcaagtagatcactaacttttccttttccttacagatgatttaagccagaagttaaaacccttgggtgaagcagaacgagagtttattttgaatttgaagaaaaaggaatgcaaagacaggggttttgaatatgatgggaaaatcaatgcctgggatctatattactacatgactcagacagaggaactcaagtattccatagaccaagagttcctcaaggaatacttcccaattgaggtggtcactgaaggcttgctgaacacctaccaggagttgttgggactttcatttgaacaaatgacagatgctcatgtttggaacaagagtgttacactttatactgtgaaggataaagctacaggagaagtattgggacagttctatttggacctctatccaaggtactgaggatcacgttgttggaagggaccttagggattcagctatgcctactttaagactctactcttggccaggcacagtggctcatgcctgtaatcccaacactttgggaggccaaggtgggaggattgcttgaggctaggagttcgagaccagcctgggcaacatagtgaggccctgtctctacaaaaaatttaaaaattaggtcaagtgtggtggctcatgcctgtagtcccagcactttgggaggccgaggcaggtggattgcttgagtctaggacttcaagaccagactgggcaacatggcaaaactctgttgctacaaaaaatacaaaaattagccaggtgtagtggtacatgcctatagtcccaggtacttgagaggctgaggtgggaggatcacttgagcctcagaggtggaggctgcagtgagccaagattgcaacactgcactccagcctgggtgacagagtgagaccctgtctcaaaaaaaaaaaaatgaaaaattagccaggtgtggtgtgcacacctgtagtcctagctgtgctgaagcaggaggatcacttgagtccaggagtttaaggttacagtgagctattatcacactgctgcattctagcctaggtgacagagctagaccctatctctaaaaaaattaatttaaaaaaagactctactcttccatatttctcacatgggcttcttagtatacagatttaaaatgtgggtctgaagccagaatgtctggcatcatcatttactaggtaggttacttaatttttctgtgccccagttttcttacctatattataggtcctataaactgggaatattagtagtacctgctttgtatggtcactgtaaggattaaattggttgaatacatgcaaagcatttagaagactgctcagcacatagcaaaggcttaatcagagttagctgctaccattgtcattatcatcatcatctagtttgtgcactacatttacttaattgaatattgaccaccacccagacatggtggctcacacctgtaatcccagcattttggaaggctgaggtgggcagatcacttgaggtcgggagttcaagatcagcctggccaatatggtgaaaccctgtctctactaaaaatacaaaaatttaacaggcatctgtagtctcagctacttgggaggccaaggtatgagaatagcttgaaccctggaactgagatcacgccactatactccagccagggcgacagagcaagattctaactcaaaaaacataaataaataaaattgagcaccaaaatatttattagataatctgtctgccaataatctatggccactcccttcagtctggctgagaggcagcacagtttagtagaagtagcaaaacctttgcagtcagtcagatttgagtttgaatgcttgagtgacataacctctttgagattctgtttcttcctctgtaatatgggactggaaatccttttacaggattgttttatgcattaaagactatatgtgcaaatcatcttccccagatatcagtggtaacaattataaaaatgttataattgtgtctatagcatgtaataactatagattccatagtgtttcatcagatacaaaaggatttggatctctttctccccaggctactttctaaagcaaagtcaacctcttacaattactaatcatttaaatagatcaaaggagagtatagtatccccctcattcagtaatacacacaagtttgtaatccactgactttgagtgctgaaaagtaggttgagtaactgtgtcatctagttggtgggcagaagtgtcttttagcacctaagtgattatcctggtgtattagtcctttctcacagtgctgtaaagaactgactgagactgggtaatttataaaggaaagaagtttaattgacttacagttctgcagggctggggagacctcaggaaacttacaatcatggcagaaggggaaacaaacacatccttcttcacgtggcggcaggaaggggaagtgccaagccaacaggggaaagccccttatgaaaccatcagctcttgtgagaactcactcactatcatgagactggctaccccatgaatcaattacttcccactgggtccctcccacgacacgtggggattatgagaactacaattcaagataagctttgggtggagacacagccaaatcacatcacctgctgctttatggacttactttcactaatattatgacctaaaagtaaaaccctgccaaatatagatgagtcttatttttaaataaaaagtatcaggatatagttttaaccgaagaactctttcaggagtaatcctttaatattggagtctcctataactgtcctcagattttctttccagcgtcaaataacaattcttgctacctcattctgctgtctcactgccaggatataattaatttcttttgtactgagagatctggtcattgctaccagcaccctggtgtgggtaacagagagtaatctttgtgaaagtagtgacctagttaatacttacttcctgtcatcttaagatgttctcttcataaaggtaaaagggattaacttgttttatttgtctaactgacttttaaaaagggtattcagaataggttttaaaaagaccaggtactgtctgggtgcagtggctgtaatcccagcactttgggaggctgaggcaggtggatcacttgaggccaggagttcaagaccagcttggtcaacatggtgaaaccccatctctagtaaaaatacaaaaattaggctgtgcacagtgactcacacctatagtcccagcactttgggaggccaaggagggcagatcacctgaggtcaggagtttgagaccagcttggccaacgtgggaaaaccccatctctactaaaaatacaaaaattagctgggtgtggtggcaggcacttgtagtcccagctactctagaggctgaggcaggagaatcatttgaacccaggaggtggacattatagttagccagtatcttgccaccgcaccccagcctgggcaacagagcaagactccgtctcaaaacaagagaacaaaattaaccagcgtggtgttgtatatatgtaataccagctactcaggaggcagaggcaggagaattgcttgaacctgggaggcagaggttgcagtgagctgagatcatgccactgcactccagcctggatgacagagcaagactctgtctcaaaaaaaaaaaaataaaaagaccaggtactattagtcttctgagcaaaagaaaagggggaaaggacacgtactcccaaaatgaagtctgatagcttttggagaatgaagtctaatagcttttggaaagaccacacagatacgacactgtacaagaatagtctaattgatagtataatttatgcattttcccaggctaactaaaagcattctgtttcaaaaaggcctgtctagtttataaaagaagcttatttaattgtgattactgattctttcctcctcaaataaaaggaaaaaccttatcgtcagaaattcagttttttattccgattttaatgaaaaggctgcctagtgagtcaaactgtatcttttatttcaaatgtgggtttcagcattgtttagtgtttagtaatcccatctttgaaaaagaaaagtagaacctcattaaaataaattggacattcagctgtcggtgtgacatgcattcttcattcttacctcgagatttttcaataaaagaaacttcggagctcacacagaatgttagtggggttattgtttgtttagctttagtttttccattttagcaaaataacctactttctaaaaggtaaattaatgtttaaaggcatctctggtaacagatatggcttaatgactggaagaggccatgccagtgtagttgctagaggagaattttcctatgttgccaacgcgtgtttctggctcctagggaaggaaaatacaatcatgcggcctgcttcggtctccagcctggctgccttctgcctgatggaagccggatgatggcagtggctgccctcgtggtgaacttctcacagccagtggcaggtcgtccctctctcctgagacacgacgaggtgaggacttactttcatgagtttggtcacgtgatgcatcagatttgtgcacaggtgagttttttttttcccccagtaaacctgccaattagtttttttagaaaacttcttgactgctgtcaggtttctgctcctaacaggttttttcagaagctgaatgtgttcaagaattttataggccttctgcaaaaccaaaattttccttatcctgtcctctttcacaacatatttttacttggaggttcatctaccagtgaaagatgtttgttgaataacagcctatggaaaaagaataagactatctgtaaggaaaggttacaaatactttgctttttccttttaatcctttaggaatttgatataaatttctcagaaaaactgtgctgtaatctgtctcttctgcttatcaatgctttgtttactttagtggtttttcaatcctcttagaccctttactcatttttaaataataattttgtaacatttgcctttactaacttcaaattaaaatcatagataatatagtctaaccatgcaaagaatttgccagagtggaggtgtatgtgtgcagtagattaaaactgatttttttatttctgaaaataaaaagtacatttattctcaactttgtaatacagtccatttaattaggcccagactattctagcatgaaccatatgaacttgctaacatttaaccattattaacatatgaaaatgtctagttcagcaattcaccgtaatagttgaaatatactgttatttggctgggcatggtggctcatgcctgtaatcccagcactttgggaggccaaggtggaaggatcgcttgagtctaggagtttgagaacagcctgggcaacgtggtaaaacaaacaaaaattatccaggcatggtggtatgtgcctgtggtcccagctactcgggaggctgaggtgggaggatcacttgagttcaggaggttgaggttgtagtgagccatgattgtgccactgcaccacagcctgggtgacagagcagaccttgacttaaaaaaaaaaaaaagaaaaccacccaaaaaactgatagtaacagaaatgaaggtacagttttccaaatttgaaatctctgtatgtctctaaaggtagacttaaaaaacaacaacaacaaaaacaaaaacatttttattaggatacttttagattcatagaaaacttgcaaagatgatataaggattgcctgtatacccctcagcctctcacccctacttgtaacatcttccattccaatagcacatttgtcatagctaagaagccagcattgatacagtactccagactgaacaccacagtttatttggattttactagttttccttaatggtctttatacagagaatcttcttaaatccatacggtgtcctcactgaatataaatagaagaaatttttgtatttttcaagtgataatgcttggatatgactatgcagtaagacataatgaagtatgctggaggtttgcactgtatggaagtaaccctgaatggagcagcagcaagtgcaaactgatggaagtggtttatgttgtcagctcaggtcctagaacagtgctgacaatggtggcatgaggttccaaaatgatgaacacctcctgggaaacttcaaaagaaagtaatctcacttcaacttacacagtagatcctagtacttgtagtcttagaaattaaaatggtgtaaaaaatgcttcgcaaggctaggcatggcagctcacacccacaaccccagcactttgggaggccaagggcggcagatcgcctgagctcaggagttcaagaccagcaacattgtgaaacccagtctctacaaaagatacaaaaattagccaggtatgatgacacacacctgtagtcccagctactcagaaggctgaggcaggaggattgcctgagcccaggaggtcgaggctgcggtgagctgtgatcgcgccactgctctccagcctgggtgaaaaagtgagacccggtctcaaaagaaaaaaaaaatgctttgcaaaaatatgtacagtggggttagtttctcggtttagttacagctagtttttttgatttatgtgaatagtccagcagggggtatgaatgacgagcaggatatggaacagtctttttgttgtcctgacatgtgcagaatcagtcctgtgcatccagcatccctatatcccagagtagccctaatcattgtaataacccaaaatgtacccattcatttccaaaataattctgtcacctttgtttaaaaactggttctttcaacattttatctttaacctggtgcttccatcttttgttttaaaaaacagaggggaatagtatatgagtatgtccagagaaatgtcctgatatggccatttttaatctctctttaatccaaggaaaataaatctttcagaataatctttctttcttaggtgtttttaaaattcattttcatagcactgactgggcgtggtggttcatgcctgtaatcccagcactttgggaggccgaggcaggaggattgctttgaccctaggggttcaagaccaggctgggcaacatggtgaaaacccatctctaccaaaaataaaaaaaattagctgggtgcggtagtgtggctaggctttgcaaggctaggcatggcagctcacacccataaccccagcactttgggaggctgaagggggaggatggtttgagcctggaaggtggaagttgcagtgagctgagagtgtgccattgcactccagcctgggcaatagggccagagcctgtctcaaaaaataaataagataggccaggcatggtggctcacacctgtaatccaagcactttgcgaggcccaggcaagtgggtcacctgagggcaggagttcgagactagcctggccaacatggcaaaaccccatctcaactaaaaatacaaaaattagccgggcatagtggcacatgcctgtaatcccagctactcaggaggctgaggcaggagaatcgcttgaacccaggaggcagaaactgcagtgaaccaagatcgtgccactgcactccagccagggtgacagagtgagactctgtctcaaaataaataaataaataaagtctattatcatagcactaggattcctgaaatatttatcgtgtggaccttctatcaatgtccacactgtggttgacatttcctttaattaggataactccagtttacatttaaaaaaattttttgtaatttagaagtcaaaaatatttttcttaattttagacttatggtatattacttatattatccaaaatccagttatatgtttgtacatagattaataatgacctgcttttaaaatagtggatgctcacatttttggatctgaggaccctatgaaaatctgatttatgctgtgggtacctcttgtagaaaaatacacctacaaatatgcatgaaattccaaaaggctcacagacccctcgaagccctcaccataatgaatctcaagttaagaactcctgagttatagcagtttccttcttatttgatgatttcacaaggaagcattttggtcttttaatcacatttattaagataatagtgatcttcaaatagggttttcagtgctcttgatgcatgttcgtttttcaggcacagtcctcttatcaacttattatcatatgcttaccatgtattccatcagttctccacaactcattccattgttcccattatttcttacattaattgtgatcttttgagatagtcactttagtactagaaagatcttttcttggtactctgacattttagagctgtctgactcgtgactgaactattaatatatatattgcattcaccagcttagtgtttctctcttgaaacagtagacatattcagttcttaaagttttgcctaacctcatccatgagcacaaatgtgtcatactgatgaataatgtgttggtacaattctttacttggtcatatcttcatgagattatctttgaaaaatctcttcttgtctattaatcctttcagatagcctgtaatattttaagaacttttaaggtcatcacaagtgatcactacttttgtttttcataggcaccgatccatatatttgcaaatttataatttcaaagccttttgtactgacctaaaatggatgatagtgaaaacagagattgacaacttctatgttcactaatacttccagcttacctaagaaacatatagtgaattaaaaatttgccatatgtattcagtacattggttttaagaaatggcagctcagtgtttgagctctccactgtggcagttggcaggtttcatgactagaagggctcgtttgagcttgtcatcgtaatatttaaacatgttggcaagaacatcccgttttcaaacatgtagatgcactagttcaatatgtctgctatctcttcattcaggacgtgagtttcactcgtattacgtttacagggtaggtaggtaattttgaagatagcaatcaagaggtgatatctgtagtatctgttcctgttgcatggctttattgtggtttgagctgtcagtaatcactagcctttgaacttctgtagaatagtaatgcctcttagcctccattgtgatgtctgtgttgtgttgtacattaagagcggtgatgaattttgaactgtaaagatgtcgttattctaaggaaacacataagaattacactaaagccttcttaattaaacgtgaaagggatgggcagaagaacttcaaattgtgtgacatgaaatcattaatttggttaaaaactaataaataaagcagcttgtctgctctaaatatttggattagattctgctgtagataaatgtaccctgtattagtcaggaaggcaccctggtgttatgacaagagcactggatcaaacatcatttgtgtatctgtggacctggctgtatgacttggggacagttatttaaactctttgaaccatctcatttttcttattcagaaaatggggacaacagcaattctatgtacttccctggacgattgggagaattaaaccaagcatatgtgaaaaggcatttggaaaagcataaggagccatatgtacgtgaagtattcttgaaactatgcttatgtataattcaactcttttgagatcaatatacaactcaaaactagaaagggggtaaaaaagaccatctgccctgagacaatttactgccacttgaggttcaacagaattcacaaatgcttaccttcagtgggttttgagtgaagatctgtggaaggtgattggaaaccctcacgtttgtatttggttctgttttgttttcatgattgctgcctacttagaatttgatacctgaaacagtaacagaaagagcagcttggagtattgggagtgatggaggattagctgaagagcaatgtgggtatgtttatctccagtattaacccccaggaagcgaaagacaagcgaaagacaaggttagaccagccaagaccatacctagtcaggcagaatatgcaggctcagaagaagataggcagctgagacttactgaacatgtaccaggtgccaggaaatatacacactgctttacattcattcatttttatcttcacagtacgctctgaagtagatgggtactgttattgtccccattttccaaatgaaaaatctgagacatagaaggacctgcccagggtccaatagtcatgacctaactgctctactttattgcgtatttgcgctcccattccatgcactggagacaatactattattcatggtctgaatttggtcttccaaatgtgttggatgggcttccttctcctaagtttattaaatgacactctaataatgtagaatgaatgcaaatgtggaatgaatgcatttatttatttctaggtttccctctgtgtgagttgactgttgaggtttcagtcctaaaatgcagtgaactccctatcatcagctttgtggcctctgctgtcaccctgtctccctagccccaactcctgcacactgttttagtttgtgactttaacatcagatgtaatttctttcaagatcttctttttgttattttatttgtttgcttatacatatataaacaatacatacatgtgtaaataaaataaatgaagtcataaaccaaaatatgaatgtattaatgcataatgtttatttgggaatgtgcttatttctttcatttgcttagtgcattttctacatgtattattttttaaaaatcaaaatattttttaaagagagggatgtttagttttttgtttgtttgtttttggagacagggtctcactctgtcactcaggctggagtgcagtggcacaatcatggctcactgtagcctccacctctccaggctcagttgatcctcccacctcagcttcctaagtagctgggaccacaggcatgtaccactacaccagggtaatttttgtattttttgtagagatagggtttcaccatgttgcccaggctgatcttgaattcctgggctcaagcaatctgcccaagtcagcctcccaaaatgctgggattacaggtgtgagccaccatgcccagcctatatagttattttaagaaacagaattattgactatgtgtctgacatgtcatattacctatggtaggatggggttcaaaagaaagaaaagttatagtatcttgaatgttcagaatttagcttgaggacatgaagtgcaacaaataaaaaattaaaagcataatattaagtaaaataataaaagtagaattttaagtattgaaaaaaagtagagaggtgagaggttgaggtcaagaatgataacaagggaaaatatctttgagttgtttaagtttgaatcttcatacagaaatattctccccagggcttcatccatttcacagatatttattggacatcctctactttctgtgctggattttggaaatacagtggtgaataaagcatactctctagcatttgagtttgaatagtacctttatttgttttcatcttaaaaagaagcagtttaaataagatgtacctgatcaggaaggtacagctagtttgggagcaagcctgtgaacttaatatgcagtattcaaaacttctccaaattatgttatttcctgggtcctttaaaggatgatggtgatactgaactgttgaactatagggcagttgtgaagataaagaaggatgtcaacacattatctttattactattatttccagtgatcactcggtatgtgtgaagttaaaactatggccttttaatcatctgtttatggcaaagtctagtagatagtggtcactttaaaaaaaaaataccttgccttgttatataaacttctccatcatccctggatttagggatagattagacaggccaggatgtggaatgactgctaagaaatcagtactggatcacctcagacagccaatgtcaggtctcctgaggcctgtcctttttcatgagcacaatacacttattgatttcagcaactgccttttctttgagttgggatttgctatcatggaaataacacttagttgtagccattaaaagcaactgttctcttaattagaacagtcacatgtaagatttaggcctttaaatacagcagaagctcataggacttccgaagcttcaatttatatgattctgttcctgttcttattgcactgtaggaattgcaaagttaatctctatagcatcaagttatctgttgtaaaaatctgaaacagagtacattttagacatcctattgtttgtttaaaagatagtaaagacagccaggcatggtggctcatgcctataatcccagcactttgggaggcagaggcgggcagatcacgaggtcaggagatcgagaccatcctggctaacacggtgaaaccccatctctactaaaaatacaaaaaattagctggacatggtggcgggcgcctgtagccccagctactcgggaggcaggagaatggcgtgaacccaggaggcggagcttgcagtgagctgagattctgccactgcactctagcttggatagtgaagaaaactctcttatttatttatttatttatttatttatttatttattttgaggcagggtctcactctgttgcccaggctggagtgcagtggcatgatcatggctcactgcagcctcagcctccaccttccaggctcaagcgatcctcccatctcagactcctgagtagctgagactacaggaatgcaccaccatgcccagctaatttttttatagtttttgtagagatggggtttcacaatgttgcccaggctgatcttgaactcctgagctcaatcaattctcctgcttctacgtctcaaagtgctggaattacaggcatgagccactgtgcctggccaaaatcgtgtatttagacaactgtcttcctctcaagaacttctaaccaaacaggaatctaagtttacattgttttctaggcttttgttatctaaatatttcctgcagcaaaaaaaatgccctaaaactctttgaagtgtcagctacaaaaaatatttgttaattggattattttgtgtgttttttactgctttatctgggaaatacattagcatcaatagttatcatggcccataagcaactattaccaacaccttcaaattgtttgcattgataactatatgaagtacttttttagggttctttggattatagtttaaaaactggggaatggtatttgttggctggtcaacagtgagtaatggttcagcacccatgctgttttgtataagatccattaggctgctagattgtgagtcttacccatggtttctgtgtggacatacacagtggctgactgcattcctttctcttgagaattcggttgtttgctgcaaattgagctttcaaattttgtaggttctttgtcctccttttttgaaaaatatttaaatgatgttgcccaaagggctcacagagaaacagcatgaccaactttcgggaaattagtaagcactagggttatttttagctttttctccttacaaacatttccttttgttctttagaagacattgttgatctttcattcatttgctgtgctgtctccccagctacaaaatggcttttgaatagaataagcgctctcttctctactctgcatgacattaactgtgttcttattttattcagtttttactctagctcatgaattatcatttgtgtattttttttctggatattgaatcctcccctacacacacaaacacacatacacacatttttgttgtcatttggggttgacttcctccctcatatgcaactaatgactgaaaaatcttcatacaagcaggatatacaaagtctgtatttttgtcagtatatcatatggtggtggctgatggtgtgatttggcctttatttgctgttagtacctatttaaaaaccatcaccttgagaaaattgtgcagtagtgtcacgggatccttggggtgtcgcatcaccagccagaaacctctgtgaccagtggtacctttgcccaggttttgcttgggcccactgggcccactcagcctggcaggctgcactcagctcgcactactggcctggatcccatgcctgccaagggcaagtggagtggcaaggggtgcatgagtgagcaagcatggggtccagccactgcacacagccaggcatgctggctatggcggtgcaagcagctccaggtgccagcacaggcgctggaggcaaggctgcctgcaaggctgcagccggaccaggcgtaccacaagcagctttcacagctggcactggggaacacagtggcacccagaagcttagagacgctgggaaccacatagccccaaagaaggtatcacagccctagctcagggagctcctaggtctgggttccctgaagggccacaactcttctctccttgttgcccacagcatggcgagcaaggggcatgtttcagccctgtttgtgttatagccctttaggccccaccattcggcaggtcccgagttcctgtcccgtgcccaggaagaaggaggtatacgaacaagtggagggtgagcaaggcaaagaggagctttactgagcaatagaacagcttagaggagacgcacaatgggtagctcctctccacaaccagggtgtaccaatgtgagtgttcagctatcagcagagagtagaccctggagtggatagctcctctccacaggtaggtcatcctgtagagggttcagctctcagcagagaagagaccctggggtgggtagttcctctccgcagctggtttgtcccaccatcttttcaactttcagtatagaggagaccctgggatatgtagctcctctttacagctgatcgtcccgatgtctgctcagctgtcagcagagaggagaccctggagtgggtagctcctctctgcagctggttgtcctgacatcagctcaagtctggctgagtccagtgtttttatgggcttcagaggggagaacgtgcaggctgattggcttatgggtgggcctggcaaaagcaccataagttcccactctggtctgcaggactggcagcctggcccccaggcttcaggccttccctggcttgaaggtggggcttcaccagggacccacccctttctgcccaggaacctgtctgcctgctaccactgtttatggtgcccaggctgttcatgcagaggggcacctgcaggccagtgccaagccacgctcagttcccccctcagcttccctcccatgctcgtcagtgcccaaagttcagtaggggctgaggcagcaaggggctggcatgtcagtgctgtcctgagcatatggacacctggccaggttgtgacagtgcctgggattgacctcagctttgctccaagatcagagcaggtgccgctaatgggttgggggagcttccggggcccctgagagtacagagatgcctgggtccgcagccatggctgggtagctgtagctacacccaggagggtggggctcctgccttcttccagcccctaagagtacagggatgcccaggtctgcatctatggcttaggaaaccgcagctgtgcccaggagggtagggctcctgcctgctcctggcccccaagagcacaggcatacctgggtcagcagccacagcttgggcagctgcagctatgcccaggagggtgaggctcttgccctgccaacttagaagggggaaggacttttctgcctgttcctggctcctgccagctccatggagcgcacagccccagccacgcttcccccactgcagccgagatgggccaccactgccatcagtagtattgcagaatcgcaagttcaggatagatggttacaaaggctggtctttacacttcagcttcatgtttgatctttgaaaaatcttccagtataaagaagaagtcaaatttctaaggaagcacactgaaaactcactttaactcttcacataaaggagggtttgatataagacttttgtattttagatcccatccaagaggatttagtcattttgtaatatcatttaaccttttttttccattttactctaagatacggagacagttagcatttgtggttaagattgtgggttatgaagtcagactgcctggtttcaaattgaagttacatcattaatctctgtatgctttagtttccttatctcaaaaagggagataatagttacttcatacaattattttgggatttaaatcagataatccatgtaaagagcccatgatatgagcacacctcattttattgtccttcacttattgtacttcacagatattttgttttttacaaattgaaggtttatgtcaaccatgctttaaacaagtgtgttagtgctgtttttccaacagcatgtgcttacttcttgtctctgttcacgttttgggattctcacaatatttcacttttttctttgtttttgatggagtcacaccctgttgctcaggttggagtccagtggtgcagtctcagctcactgcaacctccacctcctgggttcaagcaatctcctgtctcagcctcctaagtagctgggattacaggcacataccaccacacccagctaatttttttttgtatttttagtagacatgggttcaccgtgtgggccaagctgatcttgatctcctggcctcaaatgatctgcctacctcggccttctgaagttctgggattacagatgtgagctaccacacccggacaattttttcattgttattgtgtctgttatggtgatctgtgatcagtgatttccttttttatgaaatagagacagggtcttgccatgttgcccaggcaagtctgtcagtgcaatttttccaacagaatgtgctcccttcatgtctctatgtcacatttttgtaattctcacagtatttcagacttttccattatttttatatctgttattgtgaccagcaatctttgatattactattgcaattgttttgaggcaacacaaatcatgctctttataagagagtgaacttaattgatgaatgttatatgtatactgactgctccaccggccatttcccatttctcaccccctcttttggcctcctatctgagactcaacaatgttgaaattagattagtcaataaccctacaatgatctgtaagtgttcaagtgaaaggaagagtcataagtcttttgctttaaatcaaaagctagaaatgatcaaacttcacgagggaggcatgtcaaaagatgagataggcctcttgtgccagtcagtcaagttatgaaacaaaggaaaaagttcctgaaagttattacaagtgctactccaatgaacacacaaataataagaaagcaaaatagacttgttgctgagtggagaaagttttagtggtctgggtagaagatgaaaccagctacaacattcccttaagacaaagtctaatccagagcaagaccctaactcccattctatgaagctgagagaagtgaggaagctgcagaagaaaagttggaaggtagcagaggttggttcatgagttttaaagaaagaagctgtttccataacataaaagtgcaaggtgaagcagcaattgctgatttagaagctgtggcaagttatccagaagatctagttaagatcattgatgaatgtggctacactaaatgacagatcttccatgtagatgaaatagccttctattggtagaagatgccgtctaggactttcaggaatgctagagagatgtcaatgcctggcttgaaagcttcaagggacaggctgactctcctcttaggagttaatgcagctggtgacttgaagttgaagccaatgcttatttaccattctgaaaattctagagcccttaagaattatgctgaatccactctgcctgtgccctataaatgaaacaacaaagcctggatgacaacacatctgtttacagcatggtttactgactattttaagccactgttgagatctactactcaaaaaaaaaagattcctttcaaaatattaccactccttgacaaagcacctggtcagacaagagcttggatggagatgttccagaagattatgttgttttcatgcctgctaacacaacagccattctgctgtccatggatcgaggagtaatttcaactttcaagtcttattattatgagaaatacatttcataagactacagctgccatatatagtaatttctctgagggatcttggcaaagtacattgacaaccttctggaaaggattcaccattccaaatgccattaagaacatgcatgattcatgggaagagatcaaaatatcaacattaacagaaatttgtaagaaattgatttcaaccctcatagatgactttgaggaaggggttcaagacctcagtggaggaaggagctgcagatatggtagaaacagcaggacaactaaaattagaagtggagcctgaagatgtgactgaattgctgcaatctcatgataaaacttaaagagatgaggagttgcttcttaaggatgagcaacagaagtgacttctttatatgcaatctactcctggtgaagatgctatgaatatcgttgaaatgactgaccacgaaggattttagaatattacataaacttagttggtagagcagtggcaggtattgagataattgactccaattttgaaagacattctgttgtgggtgaaatgctatctaacagcatcgcatgctaccaagaaatctttcatgaaaggaagattcagtccattgatatggcaaactgcatctttgtcttattttaagaaatagcggctggctgcgttggctcccacctgtaatcccagcactctgggaggccgaggtgggtggatcacctgcggtcaggagtttgagaccagcctggccaacatggtgaaaccccatctctactaaaaatacaaaaagtagccgggcatgatggtgcccacctgtagtcccagctactagggaaggtaaggcgggaggatcgcttgaacccgggaggcagaggttacagtgagctgagatcataccactgcactccaacctgggcaacagagcaagaccctgtctcaaaaaaaaaaaaagaaagaaagaaaagaaaaaaaggaagaaggaaattgccacagccatgccaaccttccataattacaccctgatcagttagcaccctgattataactaccaccatgatcagtcagcagccatcaacattgatggaggcaagaccctccaccagcaaaaaagattatagcttgccaaaggctcagatgatcattagcattttttaacatataaggtgtatacattgtctttgtgggtgtttttggttttgattttttttttttctttttttgagacagagtctcactctgttgcccaggctggaatgcactggtgctatcttggctcactgcaacctccacctcccaagttcaagcaattctcctgcctcagcctcctgagtagctgggattacaggtgcccgccaccatgcctggctaatttttgtatttttagtagagacagagtttcatcatgttggccaggctggctcgaactcctgacctcaggtgatccacccacctccgcctcccagagtgctgggattacaggcgtgagtcaccgcaccagccatgtacattgttttttagacaattcttttgaacagttaatagactagagtataatgtaaatttatagactttcatctgcactgggaaatcaaaaagtttgtgtggcttactttattgtgatattcacttcattgcagtggtctggaactaaacccacaatatctgtaaggtatgcctgtaatgcctaacataggaaagtctcaacagatgttagctattattattgtataagattgttttatttatgatataagatgtaatcttacactatcatataccataatgagataaaatattcaatttctggggacccttacctctttccctgcaagattttttttattgggatgtcctcaatagaggtggcttaattccacaactagtgaatttagttatccttgcccctttaatatttgcatctcttcatatctagaatcggcacaattataatgagaaatcaagcaaaacatttttttgcataaagagaggaaggcagaatgtgagatggcgttgacatctgtgcctctgccctgggccaaaaagcagagtgggtatttgctgctgattcggcaccccatctgctgccttctctggtggttacatccctcttccctttcccctccgtgtggagccccagggatgatgaagtcagggagagaaggatggaatgtaatgcatcagaggagaaaaacaggacagaggttcagtgaaagacaacggaatgaggagccccattctgcagatgacccagtaggataaatgctgtcttctctgccaatggcagttttacaagtgtttgaaggactgtgtgaaggttaaaaaaacactagcctgttttagtgaatctctgtttttctacttgagagcttttctgacgtctgactcaagaatttactaaacttggtttcattaaactctttttaaacctcttttgtttttttaactcttagctcaggccttcagaataggtcgtttgtttttaccaggagtgctccaacttttgaatacatccgttgtttctcttttcctatagcatataactcactccacttgccaattaatttacaaacctaactcctactaaagcagcttcttattttaaggtaacattgtctacccaatctgagaggtagaaatctgactttctacaacatggtaatcttagaaccactcatttaaagtttaaaatgcaaagcatcgcacactcaaagtctataatgttgtgatttaactctttaattaattttggttaagacctaagtagttaagacctaagcaatagagtgatgagtgccccagaaaggcatggattgagacctaagcaatagagtgatgagtgccccagaaaggcatggattgagtaaacaaaagtaagcaattggaaggaggagctagggagaaattgcttgtttaatggatctcttcatttttaatggaaaattctttaaaaatacttctgctttcaaagcttaaggcttgtttttagcttagactgattgtatttttcagttctggttttctgatgattgttccaactttgtctacaattcaaaggaatgaaattactactgtaatatagagtatttgggggttgtttttcacactgttcagctgctgtgttttattttcacttgactatgaggttattctaacccctcattcagaggaacagttgagtctgattctgccttaagttttcgtgactcttaataattattcattgcatatgtactttcattgagttctttaaaaaaattctctgtgtttgctttctagactgattttgcacgatttagcggaacaaatgtggaaactgactttgtagaggtgccatcgcaaatgcttgaaaattgggtgtgggacgtcgattccctccgaagattgtcaaaacattataaagatggaagccctattgcagacgatctgcttgaaaaacttgttgcttctaggctggtcaacacaggtatgacttctaattttaaaaaggaaaataaattagaatctcttaatgtagaattgctgtcaccttcttctgtagaacttattttcattttaagtggtatcccaaccgtgctagcatgaggagtgaagaacattaaatatattggaataggaaaccccggaattttgtctgaggcaaaaaaccacatctccttttaaatcttaagtagaatgagatgtcctgctcccattttgtgagtactactggaatctgtttttggaatctacaatcttgtgataataaaacacacagttctgtcttcttcaaaacatgcccaaacattcttatgttattaggtcttctgaccctgcgccagattgttttgagcaaagttgatcagtctcttcataccaacacatcgctggatgctgcaagtgaatatgccaaatactgctcagaaatattaggagttgcagctactccaggtatgtaactactatgaattgagttcatttctctgtgaagcacagggcgttctcctaacactgcaggggagatggagtttgtcagacagattacctaattgtttctgatttctgtaatcaggccatgactttcagataagcatactatgtccttatgagttatcccgtccaaatgcgcttgaaggaaaggtggctccagatctgcagcattttagtgtaatcaggcatgagcagttggcctccgccccagagctgggagagccattcgtgttggcagcacactctcagctcctccctccctgtatgcatcatgacttccctgtgattttcaggaagaaattggcagaaggggaactttttaagttttttttcctttacatatagtattttgtttattttttccatcccctcaagcatttatcctttgtgttacatacagtccacttgcactcttttagttatttttaaatgtacaattaaattattattgactatagtcatcctgttatgctatcaagaaggagcattttcaggcctggcatggtggctcacacctgtaatcccagcactttgggaggctgaggcaggaagatcacttgagctcgggagttcgagaccagcctaggcaacatggcaaaacccgtctctaccaaaatacaaaaattagccaggtgtggtggtgtatacctacagtcctagctacccagggggctgagttgagaggatcacctgagcctggggaggttaagcctgcagcgagccatgattgcaccactgcactccagcctgggtgacacagtgagaccctgtctcaaaaaaaataaagggtatttggggggagaagcatgaacttcaccttgtttctgattctgagatcagttaaagcatttgactagcagtttgtaatctgagatttatgggactcatgcatgggcgtgtttatatttgtatgtgtatgttttaagccaatatatagttgtgcttttatatgtagttggtaaggtggattttttttcaccaaggaaattgttattaaaatgagtcagccacatttatagagagaataaagataagaatggtccgttgagtcattctaggctccccacatagtaagccatagtgcacctttgtgtcacaagcctttgtgtcgcaattacatttttaaatgtacaattaaattattattgactatagccatcctgttatgctatcaagaagggacatttttaggcctggcatggtggctcacgcctgtaatccagcattttgggaggctgaggcgggaagatcacttgagctcaggatttttgacaaaatcctatataaagtagccctacaggtagattgaattggtgaaaagttctttttcaggcaaggcacggtgactcacgcctgtaatcccaacactttgggagaccgaggcaggcagatagatcacttgaggtcagaagtttgagaccagcctgaccaaagtggtgaaaccctgtatctactaaaaaatatgaaaattagccggcgtggtggcatgcacctgtaatccgagctactcaggaggctgaggcaggagaatcccttgaacctgggatgctgaggttgcattgagccgagatctcaccactgtactccagcttgggcaacagagtgaaactctgtctcaaaaaaaagttctttttcagtaattatcaacctaaaataagtgcaattctgagacattttagatataaagaggtgtggcaaagagtagggttaatattatttttcaaaacacatacatgtttaagagataagaaaggactgatttcagttctaaaacactgagctatctggtgggtgtggacaaagccgctgaaactatccttaggcattccagagcttggggccgaaaccagctctgaggttgagccattgatagatgtttataaacatcttggccaagaggacacatcagcccaaggagtactagaggtgagatcatgtcattcattctctcctcccacagctggcctcctcagagggaaaccttagctagctgttaacctgatcattaacgtttgctatcacattgattgaaatgtatctttttttaaaggcacaaatatgccagctacctttggacatttggcagggggatacgatggccaatattatggatatctttggagtgaagtattttccatggatatgttttacagctgttttaaaaaagaagggataatgaatccagaggtatagtattatttttctccttttattaattttgtagttgctccctcccctttaactcctagtgtaaaatattggtcacatctagattttactgtaagaggcttggtaacagcttttacctctgaggccctgcatctttcaaatcatcatacatcattaagttgcagtatacaagtgattaattctatagtttaaaaaaaactagtatattttcttgcttattaacattctgatatattacataattaaaaattcaaagctttgtttatggatttgagaatctgtagctgctagttttgacatgtaccatacaacattttagttttataggaggttgggaaagaaaggtaaactccttcctgatgtaaatggtttccctgtgttttgatattctctacacactttgtgcactttctgtgggagacgccctttttctgtggctggcatgccccacccactacatagtttgtgacctttgtcacaaagttgcttcgttaacctgagccattactttctgtatgcagtgaattgactgccaggtagctgccagacaaaccttcctgatttacagcccccaatctccattctcattgaagtctcatccatcagattatttccaaggctgatgcattttccaatgtatgtttttaaattcttcgattcagaaattagaagaacaaattatcaaaatcaggctctctgtactgatttcaaccaatagatttttttctccaaatgttttttctagattgcatagtaccttatacatatgtattgaaatacattgatgtgatttagatcaccattccctccccatcttcctcctgaaataacacctccaaggtacccatacttcattattttgaagcatttcatctcccatcccaccccacccaatctgttaagtccttgtaattctttttccattacctggccaacccatttacaaaggtcaactgctgactattgttctcacagacatacctattcctgcatgaccttcaaccaggacccatcccttaatgcctccaccatagagatagtgcccttaggattcaaagtgttctggggaagattgtatgactccactgacatgcccaactgcaaagtcatgcatgtagcctgaactggaccccagtgttctctgtggtccaactccattccccttattgatttccctccaagttcccaccacctctctcatctgtcagcagatgatctctcctctttattaagaaaattaagatcattgaagctggctgcagtggctcacacctgtaatcccagaactttgggaggctgaggtgggaggatcgctcaagtccaggaatttgaaaccaacctatttgatatagcaagacctcatctctacaaaaaataaacagaattagccaggtgtggtggtagaagcctatagccccagctactctggaagctgagatgggagagttgcttgagcctaggagaggtggaagctgcagtgagccgagatcatgctactacactccagcctgaatgacagagtgagattatctcaaaaaaaaaaaaatcattgagaatgagtaccttcatctttctttctgtgtacttcaatacttgtcttattttctcctgtctcagaggagatgtctctagctccaggagttcctggtaagagttcctggtttgctgtcttggaaaaaaaacttgctactgactctgataaccccaatcagtgctactactctgttcttttcacagcctaatttcttggtataagaagtctttgcaaacctctctttccttgcttttgccccaaccaacagaaatggaaagttacccttcctccgtagttaccactgatgacccagttaccaactccaaaggccctcgtccttcttctttacctcctgctgcttgttattcctctgtctgttcacagccctcagctgggcaatcaaacccttctttacttcccagtactccctgtgtgttagacaagtttatgtgttcccttaggtctctccaccttcacaaatttattcgttctatttcgttcacctaaaatatatgcctccttcatctgtgcatctcaaaaattccagcagtcttaattgaaggtctcactcacataactgcatgttcaagaagtctttgaaattatccaaaaccaaaagtgatctttacatcctttgaacatatgagtggacttggaggagtggaccaagccttccccgtcacctcctcagtgctgccactatgtgaccacatacccagtaccttctctcattaccttttctcttctcttttggagaactgtccccaaaacaaatagaaattaaaaatccaaagataaaaataaaaaatggaaaatagactagtttttaaagaaaaaagacaaaaaaaagtggtcttgagcatggaagaagggcttcaataagcttttactatgtctgcaatatttaatgtaactattaccaagtgaaaaaacatcatattataaaatattttataccatacaatacgaatgttgattttaaagtgtgttttaaaaaaaagtacatcaaaatgtcaatgattatctttggggataagtttatgagtgattattaattttttctgtatttttcctagagcttttccttatttttacatagtacatagattattttagaagccagaaacaatgtttcaaagagaaaaaagtctaactaggtaaaggtacaattatgacgtcttactggcaatcattggtgaggcttcctggcataagtgtacactgcctctcccagccaagcttcgccatcacctcctctgtgcttgcccttatgtgaccatatacccagaaccctctatcattaccttttctcttccagctgtcaaggtagcagccaaattactgatccctgtggttccaaggaacttgcaagtgtaatagaagcaattcctgcattgtcttctctatacttcctcttattctcaggcttcacagtttggcaggcagccatactactcttatttagacaaaggtgctgggttgaacttagagaaagcatcatcccaacaacttggagttaaaacttgtgatgttgaaaacaattttcagtgttactaaaattctggattcagcagtgctgttattattagatgtcttatgccataaggctggtgttaattccttcctttacactttttcctttcctttcaaatgctctgagtatcatggcacttcctgatcctctgctgtcacagcaataatggacctggctccaaaagccaagaagaatcccttggcccctcaccctcacaccctttgcagatactaaaagatgatttttaaacaaacattttgttccctcctacaatatactatttggggttttttgttggtggcggcgggggatgttcttcaaaaaaaaacccacaaatatttgctctaaaataacacttgccttacaaaatacaggtacccagttattaaaaattaatgctttgggacaacaatcctagtctccaaaaaacttagatcattattatagctatgtgtgatgaagagaaaaagaaattcttttgttgtcccaaagcattaatttttggtaactgggtacttgtattttctaatgtgagtgttactttagagcgaacatttattttaaaaagaaaagaggaagaagaactccccccacaaaaacaatgtataccacggaatacagtgcagccaagaaaaagaacaagatctgaacccagaaggcagaggttgcagtgagccaagattgcaccattgcactccagcctgggcaacaagagtgaaactcatctcaaaaaaaaaataaaaagaacaagatcatgtcctttgtagggacatggatggagctggaggccattacctttagcaaactaacacaggaatcaaaaaccaaataccacatgttctcacttaaaagtgggagctaaatgatgcgaacacatggacacgtagaggagaacagcacacactggggccttttggagaaggtgaaagatgggaggaaggagaggatcaggaaaagtaactaatcggtactagctttaatacctggataatgaaataatctgtatggcaaacccatgtgacacaagtttacctatgtaacaaacctgtactcgtaccccgaacgtaaaagttaaaaaaaaaaaaaagaaacagaaaaatacttcttcagaccagtacaccatacattacttattttgtgccacaaccacagagtgttattagccaacactgagaaagatggcattatcttgagttgttccaaactcggtgcatttgctttagtttcacatgtcagtgagtggtggcttcagatacatagacaggataaaaatatgaatttttatgatataaaggaatacttcatttgatctgaagtcatgggaagcagacaaatcaaaatatatcctgcagactttgttgtctcaccctccctaatgtgtgtgtgggtcattttgagaaggtagcgggatggcccttcaaagcgtcagtgccttctattgttagtccccaggcactagagaggctgggagctaagaaaccacatgttgttgatgttattggttatgcaatagagaagactgtgtccaggccttccttctctctgtaacctcctgccatcctacaaaccccagggtctgctctggggaccatttcagatcttggcaagcagaactatagaaagtagcagtagaatattttagggtatagttttcattctgttttgagggcctctatcaaagtataataactgactgcttacctataatagcctaaaactttgctacctctggttttatctgtagttttttaaatattgttcttcatagtaaatagacatcacatcgtaactgtttaattactttgttatatattacctaaagtacttttttctcagtgaacatgaagttgtctcattgtcagacatacttttcacttttctaactgttctgctaaataattatggaatggaactgcttgggattaatgcttttccaggaagctctcaaaggtctttaaggtcaccaaatgtgaattcagaatccagcagctaatcataggttgaaataatgggggcattttaaccaaggccatttctttttataaggcaacttcattgtgggaaaattttctaagaggtaatagacattgtgaattcaaaggcaattatattgttaagctactattatcttcctcctcttttgcatttgaagaaattgctaagctttgtttcttccatcagaggagaagaaatatgaacaagtatcacttctgaaagaaatactgagaaattcaagagagttaagtgtaactatatttcagtctgtaatgccataaggaaggagctacatcttacataaaataatagccacaaaaacatgaagagtcttggttaaacatgacaaagaatcacttgatagagaatctataatataaagctaaggatcccagtgcttgaaacagaatcttaggcccaattcttcctgtaatgtgttgctaaaagagaatatgaaatttcctctccagaaggtttttacaaatggctttaattctcttctctgtctcagctctcctgatgtaccacccaacagctgatttttcttataactgaaccttttctagtagcctcaggtttcgcctgacttgagggacaaaggaaggaattcgaattgatttccaacctacttcttgaatatttacaaggccaggccttctaaatcttgaatcccaaccagctggaagcagttcatcttcctttgggctcttacagcccttctttgtttgctcttagtaccccaataatctgcctggttagttgtctatttctttatcttccctgatagatcataagactcgtgtaaaaggaactattttattcagcgttgggttcccttctctgcttcacaactatttaatttaattaatgttttacatatttgtgcctctttggacctgacggttttctccatccgcttccacttctctacccccccatacatactcctacccagtgtgttttttcctttggatctcctccctccccagaaataaaggtttacccttctatcctcacaaatcagtaaggtttccagaagacctcttctaatcaggcaacaattcctactactattcttgtctccatctctcagtcagcaccagtttttttctctccctcctttgttgttgtcaaagcaattctatttttaatttttgtccattcaagatctccccaccctcacagaaaacaaagggtgtgctcttgggagggagttatggactatggaaggagaggtttcaaagtccagctttagagcaggctggtgagcttgtcaggtgcctgatcgtcatcccccgtccttggctggtcgctctctgccctgatgactgccgctcagtgtaggaaggagacagctctggctgccctccccagagtcatccatgctgggaaggatggaggaggggtggaaagttagtgagagcctgcatgtgctgctgcagagatgcccaagatagcaggagacccaatctgtttcccatttatatattctcattgctgatagatgatggacatccttcatttaggtaattattattgctattaaaatattacctgaaagggtgcatattattgagcaaaatgagtgcctaagtgccttatctctcccacttaatatttctactgaattatgtattctatttcttactaatagagaaaatgaagttccttatgcctttctttagctttattaggagatagaactaattttgaggaagtgctacaccaggaatgcatttgtttccctgaactgtatataagtaactgagctggggcagtgtgaaaggaaagagaggagaggggaggaggaaaggagatgggaggaggagaggtttgttgattaccactctatgccagatattatgctagagagcaaacagaatactgaaatcacctcctccaactgcccagaaactgagtgaggtaggcatattcccatttgacagatgaggaaatcaaggccccaggtcacatagctaaggattgagccaagattcaaacccgggcctgagtctagagttcctgatcttgcttcagaaattgtcactgttagagaagacttgcatagctgccaaaagatacatgctaatcttctaggattaaaaaagccacagaggtggatgacactggttttcctccataggaaagctctagtttttactgtatgcagatcttcctgaaggatgtttctaatatgaaaaattttagcagttgtcttagagcttcttttcttgatttcctcacagttagtttctttataaacaaagtattaatagaacaacttagggcaaagactccctccacctgtggcatatgtctcccagaccacgttctctcacacaaaagagcctggtaccccccgaaacacaaaaattcacttaactatttttttttccctaagaaaagcaagatcctgttaccaaaatgactcttaaactcttctcaaaacttcattgcaaaggaaatgaaactattaaaagaccattgctctgtaattcaggaaattgaatcaacttgtttggagccataggcagaggaagatttgagctgtactgagccacatattgtgagactaaacagtgccctgctctgaaatgattttaccattcatgagctgtctctttataacaccatggagctcctcaaatgcttccttttctttactacctaaaattacagttctctgcacaaaatgaaaatacttttatcagatgttcacatttggagtgattttttaaaactttcatttcaattttccttaatgtttctatacttgtcaaatgcgtatgtctttttaataaataaaagatacatgatacatacatcttgaggctgaagaatttctgcagacgaaatattgatgattgagactggatgataggtttgtgagagctcattatactgttgtctctactattagtatgtattttaagtttttcataataaaatgtttaaaatatttttgtaattctgcagaaaaatttaactcacattgtctgcgttcttcctgtactgctctacccagagagcacagtctttccatgctcctcccactaatttaacactagtcaaattttggcattttgaccaaagaaaggaagggaagggaggtaaattgtggttgggctcaagagccatgatatgctccttcttagcttaattaaaatccatgacaagcacagccatcactcacattttagattctagattgctgctgtagtagtcatgaattgctgcagaacaggcaagaaatgacatgtttttttttgtttgtttgtttgttttcccgaaagctaattgaaggctgggcacagtagctcacacctgtaatcccagcactttgggaggccgaggcaggcagatcacttgaggccaagagttagagaccagcctggccaacatcgcaaaaccccatctttactaaaaacacaaaaaatgagccaggtgtggtggtgtgctcctgtaatctcacttacttggaggctgaggcataagaatcacttgacccctgggaggcagaggttgcagtaagcctaaactgtgccactgcactccaccctgggcgacagaatgagactctgtctcaaaaaaaaaaaaaaaagaaaagagagaaagaaaaggaaaggcagaggcagcggcaggggcaggaatggggggcggaaagggaagggagctaattgaatctagcttcaagccctcgtcgtcaggtttgggaagttcggtatcagtgactgagtgccttctcttaagaaaattgattgaaaacttgtaaataaggcaacaagactgctgtgtacctttttaatatcatactagaacactgtgtagcaaaccttcctaaagactattttatgctctgggccctagacctgtccagtatggtagccacgtgtagctgttgagcgcttgaaatgaggctaagtacaactgaagaactgaattgagatgtaccataagtataaaaaacacgttggattttgagcacttagaacaacagcaacaaaagtctccataatgtgtatattgacacgtgttgaaatgatactattgtagatatagtggtttaaaatagtaaaattaattttacctatttgtttctttaactttaaaaaaatgtggttagtagaaagtttaaagttacatatgtgcttcatattatgtttctgttggacagtgcagccctagagtttctgagaaggtaactttgactagttatttactcctgattagagtccagactgtgaagttacatgttggcctatagatgattaataagctgcaaatgatttctatttatagccaaaaggtaaccccaaaagtttgtgttcttatggccctaggacataaatcattttgtgtctgacttggtagatttcatccatgttttattttccttaaaagtttgactaaatttacctctgatggttgtaccaatcaaaatgttgttatacgacagagctggaaattctctagctcttcttgtactaagtccttttgatcaagtgatataatggatataaatttaagtgttactctgtgaattgtttattatctgtatatttggaattatgcttctgaattgtcttgccttgtttccttaaaaggacagtgaaagggaagtgaaaatattgaacaatgctgatactgaataacaactattttctttcactctatctgcacctgtgtttgtgtaaataaaagtagaggaactgtgacgttttaaaattccagacctccatccccaaagaaaactttccaaaggtcctcattcccagcatcggacccacaaaaatgtcttgccctcccctgcggggcacgtacagcccttcttctctcatccataaggaagagggttctgttgttgttgttttgaatgagcccatcataaaagcagcagaaaccatttgacagtagccatgctactgtttctgagtacccagaaggctatttgtagccttcgtgaacacttgctttctaagccttttgaaatcacgagagatagcatagcaaataggaacctgttgtatattccatttggctatattttgtttgtttgttcatgttgtcagctcactgcttagaatctaaggagacaagaccataataaaggacagtgtagaagacctgaagttttaagctccaaatctcttagctaccaaaataaataaatactacagagctgtttgtgagcaagagaaaacatctagacagagtaaggctaaagtcctttttccttcacccctaccctctcctcttttgcatctagagatttggaaaattgctagaaccatgaattattaggtatgatgttttattttattaggttggaatgaaatacagaaacctaatcctgaaacctgggggatctctggacggcatggacatgctccacaatttcttgaaacgtgagccaaaccaaaaagcgttcctaatgagtagaggcctgcatgctccgtgaactggggatctttggtagccgtccatgtctggaggacaagtcgacatcaccatgtgttactggcctggaaactgaagggagttttgcaagtgaaaatttagatttctattgacatccttttgttttctaattttaaaaattataaagatgtaaatggaattataaatactgtgacctaagaaaagacccactagaaagtaattgtactataaaatttcataaaactggatttgatttctttttatgaaagtttcatatgaatgtaacttgattttttactattataatctagataatatgatataagagggctaagaatttttaaattgaatcatatatatgatataatttgatccttcttgtatcttgaagttttgtacttgggatttctggactgataaatgaatcatcacattcttctggtaaatattttcttggagctctgtgtcaactttgatcctttgtctcccaggaaggtgtgacctctcctttgcctgcatacctcaaggccaggggaatatgcctcagtgatgcatttatctttgtatatcaggccgcatgattcccaactttctgccacacttaaattacgttcctccatttcagttttgtcttttctgtctaaagttcagtcaaagagtatcaaaaaattatgtttcagctagactggtgtaatgtataagtttttgtatcttgtattagaggatttcgtagcttttattagaggctcatttccacctcagcatacaagatcgttagtcttttggcatgtgtgccaattagaatactaaagcaagtccaagcacatttttctcttctcacgtttctaataagtgttagggactttgcctcttttacttaccacgtccccaaaagtgtcaggtagacatgtcacaaatggctctgtagagagccatgggaagagagaggaggtggatgtggaacataaagggttcagaaactccagaagaggagtgggttttggatagaagcatttgaggacagctgctccaaagccttatgtgtatgatgaaacttaaccacggggaagagactcttcagtagcctgttctgtctggtgatttttattttaagtgaacctttggatctatctttaactctctttattgtgagtctaaattccaattctgcagcagatcagtaaactcacagtatttttcctgtggaaatctattcaataaggaaaccaagacaggataataaaatttaaaaaaaaaacaactttgaattcccctgcctaggtcttccagttgttttccagcgcatacctcaggtatgactttgctagccggggacaaaattagcaccttccgattctctagtccaaatgaactttgtgctaaataaaaaattattatactacataataaagttacagatagcaggaaatgcaagagctaggagattcctagattatatctgccaagcaaataccttaaacatccacctgaaatcctactaccccctcttctgagataatttgcccagcccttctcttcccacacactcactcaatgtcacccccttctaatccccaaaactgtttttgtggtctttgtagcctatagtagttttctcacatctttccccctagacttttctgtttttcagtttcagacaaaaaaactcttcagctttttccagtgtgtctccttaacagtaactttaccacttgaaatcttatttcatagaaaaactaaattggtgtggaaaggctgcacacaataaagttatattattatccatgaaaatgaactcatatttctttcatactttaacgttaaaaccgaaatgcatgagagcaaaagcaccatggtgttctttctatttagggcctacctctaatatttaaaatctaccaaagagcagtcacaaaattaaaactcagcccgggcgcagtggctcatgcctgtaatcccagcactttgggaggccaaggcaggaggatcacctgaggtcagagttcaagaccagcatggtcaacatggtgaaaccctgtctctacaaaaatacaaaaagctgggcatgatgttgggttcctgtagtcccagctacttaggaggctgaggcaggagaatagcttgaacccgggaggtggaggttgcagtgagctgagatcatgccattgcactccagcctggacgacagagtgagattcagtctcaaaaaaaattaatactcaaagaattatctagcataatttaaaagaaaggactttttaaaaattctctagcataattcaaaagaaaggacttaacttttttttttttagtgtggtcatccgtctagttgttctttttttccagatcagagcagagaatatcactgacatgcttgaaatggtggataactatgtaaattgtaattggacaaatgtacactttagatttatggactgagccacatataataaggtctctcctggtaattgatccaggggatttaggcctctttcgggttttttgttttttttttaggcattgttatgttgtgaaggataaaatcttcaacatcttatgcaaatggatagtaggcatgatcctaaaggtttagttttacgatgctgcagagaagagaaatgtcttgacgttttgccacctgatgtagactttgtccccctctagtataaatgttgcatgttacctagataaacaactaaaaattgccttgagttatcacctgagctacttatgccaaggtcttgcctttctaaagctaataaggtgagaggtggatatctgtagctcttcggatgaaaaattgcattgtgggagataccaaaattgaggaaatagctcttcaaagaaaaattactgatatgatcattgtacttgtaaatgccttaagtagcaggcagtgactcaattttctactttaccattttacctttagcttttatgtatgaattataggtctgtggagattctgcctccccactaggccagtgtgtgtttaccatttattcattttctatcatacacaggtggattaaaatttacattaaaatttacattaaaataccatcatacttcaggcttctataacaaaatatcagactgggtggcttcaaaagcagacatttcttacagttctggaagctgggaagtcccacaatccacatgctggtaaatttggttcgtggtgaggcccctcttcctcttttactgaccacatccccaaaagtgtcaggtagacatgttacaaatagctctgtagagagccatgggaagagacaggaggcagatgtggaacataaagggtttagaaacttctgcaggcagcagtggcagggagcaagccctagagtgtctctttttacgagagcaggaatcccatcatgagagttccttcctcatgactttatctaaacccagtcacccccaacaaaggccccaccccctaaccccatcacattggctgttacggcttcaatgtaggggatggggcacaaacattcagtccataacgaatactgattcctcaaatagggtttaaacatagttaactgagcccccaaagaatgttaaaagagaaaatccattttatttgaatagatgcagtgaccacagcttcttccctcaaatcaacacattacagttagatgtctcccatctgaaattggatagcccactgaaattgaacatgccttctcttataaatgtgtggtgagaataaaagcaacaaagaaatgaatgtggtggctcacacctgtaatcctaacactttggaaggttgaggcaggaggatcctttgtgctcaagagtttgagaccagcctgagcaacacagtgagaccctgtctctacaaaaactaaaaaaattagctagggatggtggcacatgcctgtagtcccagctacttgggaggctgaggtgggaggattgcttgagcccaagaaggtcaaggctgccatgagccataatcacgccactgcactccagcctgggtgacagagaccctgtcttaaaataaaataaaaaaaaaaggaaaaggaaagacatacataccctcagttcttcgaaaaacagtcaacgtccaaaaagtttattttttgagtcacctttaatagagaaatttcccactggaaacagatccacctaagtgattatctagtatcagctgtatcaaggcaaaaggtaaaggttataagatgtaaatattagaccaaaatagccttttttaacaaacacaataatgctgtacgtctgtaacaaaacaaaatttgaaaaattgaggtaatgtacacagcgatgcacacacccccacaccacaccgtgattcctgagttttgatttggttgaattcaccttgtagttccctttcctgagaaaatacaggttcaacacatctagtccacgatgtacgtacaaggggaaggggtgaacaggaaatagactcccttattctgctcacatgagctggaacctgtactagctgcatatttcatagaccccagaggctcacctcaattgtactcctatgataaaatgtctctagcatttgtcatgagagaaactggctagaaatagtttgttcattgcgtccagcaagacacgcattgctgttgatatctttgtggctaagatggagaatgtgactggataatagttatccaggtggattactagctattgaaacagtctgagatagttgcatgatgattaacgttaaactgggagtaatttcaagtcatttggctaaaaatgaaaaaaaagtcccataaaaaggtatcaaatgtacagataatagggctggaattattaagtatgatgatgttattaacatctaaaattattttggccgggcaaggtgggtcacgcctgtaatctcagcactttgggatgccaagatgggtggatcacctgagttcaggagttcaagaccagcttggccaacatggcgaaacccgtctctactaaagaatacaaaaattagccaggtgttgtggcacatgcctgtactcccagctactcaggaggctgaggcagaagaatcatttgaaccccggaggtggaggttgcagtgagccgacattgtgccgcttcattccagcctgggcaacagagtgaaactcttgtctcaaaagtaaaaaaataataatgtttaaaaatatttcaatgtggagacaagctcaaaatgaaattagacacattccattacccaggtaaaagaaggggaagcctgacttgatagtagtattcaggaaaaaagagttggcagttttatttggccaaattccaatatcagctcatggtacagcacaccgggggagggggacgggaggcgagaactaaggctttttaagaatgtgttgatggaagtatgtgcctagatcaaaagaataatccccccggactccagtgtaagatcaattactgttggaatattgtgttcctttctagatatcacattttaagcagactttggccaagtagtacagtgtttgcaggagcagtaacaagatggtgataactttgaaaatacttctcaaaagaaaaataaaaaagaattagggaagttcagtctggagataattcagaaatacagatgataattgttttcaaattcttgaaggaaatgggagagagaataggctaattctgtattgcttcagaaaccaaatggaaacaattaaattccattagagaaacggttggaaaatatgaggaggatttagttcagtacgaggaagctgtttctaatactttttgttggttaaaaatacattccgctgctgtggaaagcctgtagctgccaggagtgttacagagggcattcctcccttgagttgacatttgtgccaaaccggcttttagggcttctccagcttttaagatgcgataatgataagatgatcatcgggaaaacatccctcagatgaaacgttcacaggctggctctgaaaactggcattcagatgattgcggctcccccatactgtaggaatattgtttatggcttaaggttgcctcgctcctcatctgtaatcagtgaaagtttatccagaggttaattaccggttttctggtgggtatctgggaactgaggatgggagattaactgttgtatatgaccatagtaaagcaaaagactgttagagaatgagtaaacgttcgttttcctccctacagaatttacagttactctctgtccattccactcactactgtcttcatcacacacacagaggcaaacgtctgattcagatagccaggtgtgccatgcatgcactccaccatattgtgatctcttcgaggcttgtttctgtcccctgtcctccacagtcctggattgttaatgaatagttcatacatgtttgttaaataaatataccttctttaaaattatcttttgttataaagatgcctttttctatggtaactgcaaaatacctaatttgtaactaaacctaaaactatgtggataagttatttctacacctgcggggggcagatttctacatgagagtcctttcttagtgtactgagagtttctgcatgaggtaaatgaaagaaacatgttttttgtaaaaaaaaaaaaaaagaaaagaaaaaaattggcaatggagaacgtttctaaagcttctcagcttctccctatgattatgtattgaaacctcggaatttgttcatctggttttcttggggggtctatgaaaagggcagagcaagcagatgtcccatgattgccctgaaattatattagatatgttcgtgtgcatggatacctgcatttttctagggatagagtccttagctttaatcagaagaaattaagaactactgtctttaaaaatgtgctttcaaacatttgttttttgaattcatttcaaagactctaacgtgcccattatgtgtcaggcgctgtgcttggcaatgaggatacaaaaagacaccccagaactggagctgctcacagtggagtggagaaggcaaatgagttcataatttattgggataaattataatagaaaggcatgtatccaaaacttttctgtgttttcccctcaaccctggttgactccactatacaatttgactgtggtgccacaaaattttacatagttaccacgccacctgccaccgcaggcttctatttttaacaaaataattgcttttctcttttcagcatttcaggagtgggaccaaatggtgttctatatctggtatatccaggagtttcttagatctggtagttaaagggcttataaaaaagagatgaaaatgttcactttgccacttttgtgcaagtggttataaattgacagccattagaagaatgatgtgggaccccttttaagctgatatgtattagatagccaagaggcattggtacatcctataagtctagaaaacaggttgttaaaataatcactgagttgtttagagatggtccagattagtcaagatttcttacttcctgttcccagcaactttttttttgagatgagatcttcccatgttgcccgggctggtctggaattattgggctcaagagattctcccacctcagcctcccaaagtgctgggattactggtgtgagccactgtgcgcggccccatcagtgttaataatttccattaccaccagtaagagccaaaaaaagcaccctagcatttcaacctcttactgcctatttgtgacttctttatgtagggatagaaactgactaaacagatcaatggaagactaaagaagcctcagggctccaaggttcagacaaagactggggctggactttaaacttacactccattcccttctgtttctttaaataatcatctgcttctcagaaatccttgttttagtctatcagacctatatattttattttcttgtcttttacttattcatgtaattatttaaatttttgatgagataatacatttgatgagagaaagtggtaggagtgattccagacaggaattttctttctcttttaatgattggatggataggtcttaaaaggaatgtaagactttattccagaacaaagcagtcatcagtccctttgtattcagggcaaagtggggaaaaccaaaagatacattttgtcctccctgttccaaatcagatgcctttctatggtcttcaacatttgtgtgactgacaagtgggacttctgttgtaattcacaatgcaatcactgttctcaacatgcacatggcccactctgtctcagcttcaattataaaatcttcagccagaggctattatcctctgttttgttcagtcagcgagatagccagtgaatttccaactgagatcaggtggcaggagaaaaatttctcacacttcatctatcaagccgttatagaccccagtatatttcctccactggggggtcctgatagggaagtttttctgaagtcatttgggaaggtgtcctaacattgcatttccattcctaattccaccttaggtgagggcagggaaataatagcttaagaaaccgtaaattcacagagctccatcctcctgtttcattattttcatgtcactaatttttcagtagataagctacatcctgtggtctacccagccatgtgaagcatttctttctctcctgcccacccttcctttctccccaaagtccaattaaataaatgaaagattctgggcaaatctctccaaatcccagcaggaacacaacagaagtctgaggcaaaaaacatagttagtgaggccatggacaacaaatctaggtgctttttaatttgggagtgggggattggaggcttttctgtgaaacaccctagttttaaattacagtcagtgtcccagtgcctgccagctaaatgagaggtttggaaggattagggtaagagtagactatatataaccacttctacaagtaaatgccttttaatttttttctaacataaatattgcaggaagagtaaatgccttttttaaatgtctgtgcaagctaggcacggtggtgcattcctatagtcctagctcttcagaaggcttgaggcagggggatcgcttgatcccaggaatcagaggctgtaatgagctatgactgtgccactgcactccagcctgggtgacagagtgagacattgtctcttaaaaaaaaaaaaaaaaaaaggtggggccgcgcatggtggctcaggtctgtaatcccagcactttgggaggctgaggtgaggggatggcttgagcccaggagttcaagaacagcctgggcaacatagtgaggccccttctctgcaaaatttttttttaaattagcctgctgtggtggcacacacctgtggttccagctactcaggaggctaaggtgggaggatactttgagcctgggaagtccagactgcagtgagctgtgattgcaccactgcactccagcctgggtgacagagtgaagtcttgtctcaaaaaatgaatgaatgaatgaatgaatgaatgaatgaatgtctgcagaatccagaagagctctatggaagatttggcatctttgaaaactcattgaccaaattttaagtataattatgaacttgttccaggaaagccaaactactatctggttgacttttatcttctgaagttcaagttaatggggaggtgggggaaaagccagttaaagtcaacttgtcttataagggtggtgagtatttgtgttaaggcatacaaaaacctgattaattcctctgtctacctagtaagtttcttaataccctatcagaattcagctggagcactagtagagcaacacactgttttctcttgtgccagtagacaaaatgtcagaacgcctgctgcattcctctgggataatagaaatgaagtcattacgttagaaagtggatcatgtgcccaggatacacttctctcaccctgaacccagtgactctttcctgggttaaagttactgatctggtggcagatgcagttctggtagccagaagagggtgagacagaagagccacttaaggaacattgaggttttatgatatttgaaatggcaatgacagattggtgtggtggctgaagtacagatgtgcctatcagaaggtgaacaccaagagggaagtgttaggacagagagccaagaacttgattgctggcaagtgctggcttgaacaagggcaattgctggaatctaagaggggtgctaatattcaagagaagaaggtgtccagtttcagggctctccttgattagcaaacaattgttttgtaattcaaggtgactagaagttttacttttcaaaggtactgtaagagactgtctaacctcctccaaaggattttcaggacttgttaaccatgaataataaaaggtatgagttcatggccaggtgcggcagctcacacctgtaatcctagctctttgggaggctgaggcaggtggatcacttctgcccaggagttcgagaccagcctaggcaatatggtgaaaccttggctctactaaaaatacgagaattagccaagtgtggtggcacgtgcctgtagtcccagctacttgggaggctgaggtgggaggatcacctgggcttgggaggtcaaggctataataaggcaagattgtagcactgcactccagcctgggccatgacagtaagaccctgtctcaaaaaaaaaaaaaaaacaaaataaaataaaaggtatcagttcaaacaaaactccttaaaactactttattacctcttatgtataaaaacttttgtagtcatgttttaatggaatattaccaaagttgacctttattgtgcctgtcagaaaaatctggctgttatcttgggttcctaaaggaagaagtaataggagctgtttggcagacttgacaacagtttctaacatttctaaacagtctaatcaataatcaaaaggacaggcagggcttggcgactcacgcctgtaatcccagcacttttgtaggctgagatgggctgatcacttgagctcaggagtttgagaccagcctgggcaacatggtgaaacccctgtctctgcgtaatacacaaaaattagctgggcatggtggtgcatgcctgtagtcccagccacttgagcctgggagatagaggctgcagtgagcgatgatggcaccactgctgtccaggcttagcgagagagtgagaccctgtctcaaaaacaaaaagacaaaacaaaacaaaaaccacagaaggacaaattgtttggctcaaccctctagaaaccataacaatataaataactctccccagtgaattgtttctgtcttaaatcttggaaataatcatttttatcgtgatttttatcatttttatcttgaatatttgtttccacaaatctcaccctcttcctccatcctcttatacacattctcacaccacgttctttaagcaaagaaaatatactttcaagctaagtgtttcttttgatgctaagacacttaaaaaataacagtggggaaagcaaaagaaataaatgcttattcctttcccatctggattttacaaagcaaactggaggagaaaacaatacaagctcagtcagtatgcattttatttcctcctgccgctctctcactctgcttgggattaaatgttcccttagtcctcaaccaaaatggcaatatgatctcatgtttgtttattgtgttgtctttgtatttcctaggtcaacagggtgcaaattttgatttactgatgtagcttctctccccaaacacagagaaattcttcagggagcttgctgtaagcatatccaagtgcagctgaatctcacaggtagacattatataaaaatagagtaacactttaagatgcaaaagtggcatcattcagtagtgccatctctgcactccaggtgcaagtccaaggattctaccaaacagggttgccaaatactaattaaactaattggttatcaatgctgttcttaaatgttatgatcctggggtttctacaatgagaagaaaaggggatgctttccattccccatacaaaacgcataaattctattatgtactctcaaatcagcaagaaattaccaagaaaaaaattatcttgtctgaaataacaatttggagagaaaatgaccagtatctgtatatgtgtatttatttccttttatcttgtcatttctctatgtccaatacataataaactttaaaaaacaggctaacatatcaagatgaagagattcattatagccactatgattttctatgataaaagaaaaaaattttttcaatacactaaaatgggataagctcaacagactagagagtttcaaatgcataggaaaaggaaataaaaagagataaaagaaattataatacttctgaaaccagcaatgtgattctgcttcacactcatgcaactggcagcaatctagctactaaggctgaagatgagcacacccagtagttccactccaagatatggaccgccaaacaaacttctacatggacaccatgagatatctactacaatgttcacagtagctttgtttacaatggcaaagcattgaaaaccaccaaagcatctatcagcagaagagtggataatgtttatttgaacaatgggctgtattgtaattaggataagggaactaaagctccatgtatcaatgtagatacaactcaagagcagtgttacaatgccattgcagaagggttcgttcagattgccctttatttaagttaaaaatatatatgtaatatatatattcaaaataatgatgtatctttggtggagctatacatactagtataaaaacatccacatgaaaatggataataaattcaaggcttcctctgatgagggagaaaggagaataggattcagaagagatatacaaggagctgaaactacaactacaataaatgtttttatttaaaaacccaatgcaaggccaggtgcggtggctcatgcctgtaatcccagcagttttgggaggccaaggcaggcagatcacttgaggtcaggagttctagaccagactggccaacatggtgaaaccccatctctactaaaagtccaaaacttagccatgtgtggtagcgggtgcctgtaatcccagctactccagcacgagaatagctggaacctaggaggtggaggttgcagtgagtctaaattgcaccaccacactccagtctgggcaacaaagcaagactccatccaaaaaaaaaaaaaaaacaaaaaaccccaaatatgtcagtatgttaaagatttctttaagcttttgttttttattgtttgatctttttaccatttttaaaaatgcttctgagtgatttatcagaacgtgtctttcaaagcacatttttttaaaccagaaatccatctgacttctatcatgcaaaacccaggcatatgggattcccacatacagttgtttctaaagactaccccttggatgtcccccataaaacccaaaaatgagcatcctaatctactgaaaatctaaaataattgaagtcatcacacaagaagcatagaagttaggtggcctgcctcctgccattttgattattctgaaacaccttttcttgctctgggcattagtgctttgagcagagggagatccctgggcttagcctcaagagttgggttagactcctgactgctccttcccgggttgtagtgctcaatcagcattcattatcattccctttttcctccttcctaacagagccttaattttctttttttctcttttttctttttttttgagacagaatctcgctctgttacccaggctggagtgcagtggcatgatctcggctcactacaacctctgcctcccgggttcaagcctcagcctcccgagcagctgggactacaggtgggcaccaccatgcccggctaatttttgtattttttggtagagacagggtttcaccatgttggccaggctgatctcaaactcctgacctcaagtgatccactcacctcagcctcccaaaatgctggtattacaggcgtgaggcaccacgcctggccaagagcctttattttcattaagtatcccaagtcatctaaggataatttcatgcctcttgccaataattgattcaggaataggtatgtgaattaatcaagggcagtgataggtgaggagaagtttgctaaggactttaaaggaaagtttcctagttttcaagaaaaagctacagaaagaaacaatctcttcctctggcattattgtgtgcagatttgaggcccagaactagagaaacagagtcagcgcagctaggtatgtcagccctgaagaccacctctcacctctgaaggttcacacaagtgagccaatatctttctgcattatttaaaccagttaagatagatttttgttagctgtggccaaagacattctaactgatacatacatacatgattcagcttctgcagttgtcagcaggtatattaatttctgccttgctagttccttcagtggttttggaaagcaaaatgattcagtgcatgtgaatgtgctttgtaaactgtaaattgctattcaagggcaagctgttactattagtaataattttgctactaagtcttaggtcttagataccaattttgtttctttctttttcatttttatttttttaggacaggatgttgctctgttttttttttttttatttttatttttttgagacgaagcctcgctcttgtctcccatgctggagtgtgatggcacgatctcagctcactgcaacctccgcctcccgggttcaagcgattctcctgcctcagcgtcctgtgtaactgggattacaggcacctgccaccatgcgcggctaatttttgtgtttttagtagagacgggggtttcaccatgttggccaggctggtctcaaactccggacctcaggtgatccaccgcgcccggcctgttgcccaggctggagtacagtgacatagtaacagctgacctgttactcaggagcctcgaactcctgagctcaagcaatcctcctgcctcggccttacaaagtgctgggattacaggcatgagccattgtgcctgccagatacaaattttaattcactatataaattgtatgtcttagaatgtatttaactcatttattttaaattgatacttccagtgaccttatgagcacttacatatcatcattttacatcatataaagcagttatatatttatagtatctgttgaggatattttcagcaattagtttttatataaaggccctaaggccttttgaatagccattatgttaaagggttaaaaaatgtccacaaaatagggtcttcttacctaaaaactgatctttagcatatcctctgtgtcagtatctacatttgtaaggagggttttcataaaaattaagggagacagtacatgtgaggtactcacagcaggacctgaaacatagttaccagcagaataataacagttcgacctaacactatgttccagggatgttctaagaacttcacattaatcgactggtactgcagaactgtattcttgttctattgcatttttaaatttttaaaatagctttattgcttaaggaaaaatgtcacatttttattatttagacaagattgggcgtgctgaaggtattatggctgtagacacatttttattatttaaaaaattcaaatacagaaaagtatgaagatgaaatgaaagtcacctcaaattccatcttgttacttgtaggctggataagcaaccaggcctttgtgtttactaaggcaggtacacatatgtatacacacatatacacacaagtatatatatgcacttatagtgtatatgtgtgtgtatatatatacatacttatgcatacataagttatttccatatgtactatatacatgtctatttttagttggacaaaaggaaaaactggcattattttttaaattatagttgattccacatcctagggtatgaaagaagccagatttttcatattgtttgggatattgcttgtaagtgggtagggtctagttaggcagcagatacttaaatacatatttacttaaataaggtcatactgtctttttaaatgctcttaatttttttaaaatttaaagtagccctttagtcacataacacatcgctatgattttttacatcataattacttacttctacccaatttctcttgtttatttattattctccctaacagctgccttttttcttttataaaaaaaaaatttttttttttttgagacagggtctcactccatccccaggctaaaatgcaatggtgtgatcgtggctcactacaatctcaaactcctgggctcaagtgatcctcacagcctcctgagtagctgggattatatgcatacaccaccatacctggctaattttttcttattttgtacagacaggttctcccatggaatcaacctaaatgcccatcaacagtaaactggataaagaaaatgtggtacatatacaccatgaaatactatgcagccataaaaagggcacaatcatgtcctttgcagcaacatggatggagctggaggacattatcctaagtgaagcaacacaagaacagaaaaccaaatactgcatgttctcacttacaactgggagctagacaatgagaatatatggatactaggaggggaacaacacacactggggcctacttgaggatggaggctggcaggagggagaggatcagaaaaaatacctatcaatactacgcatattacccagatgacaaaccccatgacactcagtttaccgatataacaaacctacacatatacccttgaacctaaaataaaagtaaaaaagggccaggcatggtggctcatgcctgtaatcccagcagtttgggaggccgaggctggcagatcacctgagatcaggagttcgagaccagcctggccaacatggtgaaaccctgtctctactaaaaataaaaaaatacaaaaattagccagatgtagtggcaggcccctttaatcccagctactcaggagctgaggccagagaatcccttgaacctgggaggcagcggttgcagtgagccgagatcatgccattgcactccagtctggggacagagtgagacttcatctcaaaaaaaaaaaggagagagagagattgagagagagtccctgcccaggctggtctcgaactcctaggcttaaaagatcctcctgccttggcctcccaaaatgctgggattataggcataagccacaacacccagcctctttttagaagtttctaattgtggtaaaaactcataacaaaatttaccatcttaatcattttttagtatgtagttcaatagtgctaagggtattcacatagttactcagcagattaatagaactttttcatctcgcaaaactgaaactgtatactgaccaaacaatccccttttcctcctccttccaggccctagtaaccatcattctacttcctgtttctgcgaatttgcagcagtcgtatattttatgtcaatttatattctccagcacctagtatagtcatgctccataaatatttgttaagtgatgaatgaatctgtatttgagctatacacaaacaaatgaaacaagaagaaagtcacacagcctcatctgtactaaggaatcaatacccgctgtcttaggccattcttgccattgctataaagaaacacctgaggctgagattttttttaacacttcagcaatttgtctaaggtctcagcatttgcaaagtggcaaagttataattcaaactcaggtgtgtctgattcccaagcttgtcttctttgtatgaggttatgctgcctaccctaagctctgccgtccctcgtttccataactggccccactgagttcttcaccataggactcagtctcactattttcagattattctcagatttatacatctctgggacaggcaatacatttttggctatgtctttctccaattttcgaagtacaaggcaaataaacacagtgtgtttcctaggacaagagtcattacctctcagaagcttggattccaaatctaaaatcatatacttaactgatactcaatgacaatgtgattgagagttctatttgtcaacttgtctaggctatatcgtacctagccattcaaccaaacactgtgtcacaaccaaagatggtgttgtgaaggtattttgcagatgtgataaatatctacagccagctaactttaaggaaaggggattatcctggataatctgggtaggataaatccagttcgttgaaagtctttaagagtagaattcaggtttccctaaggaaaaaagaaattgtgtctatggaccaaagtgtccgcctctgcctgagagtttctagcctgccgttcctgatggcctgccctgcacatatcagacttgcctaccttgcccccataatcacagaaaccaattcctcacaataaagctctttcctctctctctctctgtgtgtgtgtgtgtgtgtgtgtgtgtatgtttctgtgtgtgacacaaaaagcacccaggagtgctgaacaaacatgatttcttccaactattagtgtcctgatgataacccctggggctaattagtccccaagtattcacattgttaactggatagagtgtctgcagggacaaaccctagagccctggatgatagatatgttaccatctcttccctctccctgcctctgatggagtgggctttgtattgatctctacacccaacttatcccagacttaaccctggccctatctctccaacacttgcctcatatttcaccctttagcctgagtcctgagtgataagtaccatctgactttcctactactgtgcccagcctaatttaatggaaacccagtggttaccatttctggaattgaaatgtgtgtcctttagacgcttcaagcgtggctctgcctgtcccagctgcttaggcttctggagtcgtccttgggagccaggtccatcttactgtccaaccttgatgggcagctcttaagccatccccatctcaccaattccatgcagccaccaacagagcatcctgcttcctaatcattgcacaagccatgaaggatggctagaacgatctattccagctaaccatgagtaacccagccatggaacatacagccttttccaaaaacgagtagaacctagttttccaaagctgagcttgaaaatattcggcatgtgtttgtgtggtacattcccaactttgtgactgaagtttcagaaatcaaattcactttcacctagctgtgttgctatgttatctatagttcgtaatgattctgtctctgcaggcaattgcagtatatgctaaattctgtctactctttttttttttttttttttgagacggagtctcgctcagttccccaggctggagtgcagtggcgcgaactcggctcactgcaagctccaccttccgagttcacgctattctcccgcctcagcctcccgagtagctgggactacaggcgcccgccgccacgcccggccaggatggtctcgatctcctgatctcgtgatccgcccgcctcggcctcccaaagtgctgggattacaggcgtgagccaccgcgcccggccctgtctactcttaaatatccatgagaatgggagactgtggagcagatatagagtcttaaaaaaattattcattttagtcatgaattcaacttccttcaccacaaaaacttagatccaagttgtgaacaactaccaagaatgaccaatcagggattccttttatctcctcacttctcccctgatgaaagcatgtaaagcagtgattgaaagccaactacaaaaagggagacatcctcattattcctagacttaatggtggagatttctacagacaatggttgtattcttggccacatcatttaacatccttgaacttcatccaaaactggaaggaactggactttttttccaaggtcccttttgccactgaagtcccatgagccttgagaatcaaagtactgttgagatgtccattcacccaaggaaggaggagataagggcaggcaatcagaagtcctgtttgcatgaggttctcctaagctccataggcagtggcagtgggctaatcggtaaaaatatggccagtacaacgtgaaggcccactgcatataatggcaggaagaactcactcactttctctttccagaagattttttttttttttttggaaacaggtcttgctctgtggcacaggctggagtgcagtggtataactggctcactgcagcctccatctcccagtctcaagtgatcctcccacctcagcctcccaagtagttgggaccacaggcatgggccacaacaccacaacacccagtttttttttttttgtcttctaaattttgtacagacagcatctcatgcttcccagactgatgctgaactcttgagctgcggcaatcctcctatcttggcctctcaaagtggtaggattacaggcgtgagccaccatgcccagttgaaagtaagttgaactaagcagaattgggctttgaatagtgaaaaggaactggaacagtgtttgctgttgttttatttttctaatggtggtggaagggacgatgctacagggtagacttctaagttctggatgctgtcagagtcagacagagaatcaggcagctgctgagatgcctgggtcttatggagcccgggcagaagcccatcctgcccaggtctgttgtgacccggcactcttgtcagtatcacttcgtgctcaccccagccccactcaagcaccattggtccaccttagtttcacctcgtcactgcatcagcaaaagggattttgggactgagaataaagttctcccattaggagagatgaaagctgctccaactctgaggagagagtccccgaaaagaacagaaacttaccatcagattgaagagaaggggacgtgttccttttgcgaccatgagctgaggttgttgagcatgcctgagagagtggtgcagactagggtcacaggaatagtgacccccctctagcccagaacctgatgaagataaatctctccgtgtctataaggatctggcgcaatctggagaaataagggtcatatgtaaataaacctaattggattgaagggaactgagaggatagaagttaattcctgtaaatttggattgatgccactaatacctcccaatgtaggccagaccatgggcaagagaatatgaattgagatgaatctaagttttctgttttttaaaggctttagatagttttctgacaagttagatcttccttagtcataatagatataaggccaggcatggtggctcatgcctgtagtcctgttattggaaaggggttcttatccagaccccaagagagggttcttggatcttacacaagaaagaattaggggccagtccacagactaaaatgaaagcaagtttattaggaaagtaaaggaataaagaatggctactccatagacagagcagccctaagggctgctggttgcccatttttatggttattttttgatgatatgctaaacaaggggtggattattcatgcctccccttttagaccacataggtatcttcctgacgttgccatggcatttgcaaactgtcatgctgctggcaggagtgtagcagtgaggacaaccagaggccactctcatcgccatcttggttttggtgggttttggccagcttctttactgcaacttgttttatcagcaaggtctttatgacctgtattttgtgccaatctcctatctcatcctgtggcttagaatgccttaactgtctgaaaatgcagcccaataggtctcagcctcattttacccagcccctttccaagatggagttgctctggttcaaatgcctctgacaatcccagtgttttgggaggctgaagtgagaggattgcttgagcccaggagtttgagaccagcctgggcaagatagcaagaccctgtctctaaaaaaaaaaaaaaaaattagccgggcatggggagctatgatcctcccactgcacttcagcctgggtgatagattgtctcttaaaaaataaataaataaataaataaataaataaataaataaataaacgaatacatacctctatgtagagaacaattgttttttattttatttttatttttattgaaacagtgtctcactctctcacccaggctggattgcaatggcgcaatttcatctcactgcaatctccacctcctgggctcaagtgatcctccctgcctcccgagtagctgggactacaggaacatgccaccacaccgagctaactggctaatttttgtattttttagagacagggttttgccatgttgcccaggctggtcttgaactcccggattcaagtaatcctccttccttggcctcccaaagtgctgggattacagccactatgcccagcctaacagttgttttttaaattgagataagataatagcataacataaaatttgccacttaaagcacttttaaatatacagttctgtgacattaaacatattcacattgttgtgcaatcatcaccactatctatctccagaactcttcttgcaaaactgaaacttgtacccattacacaacaactcattttgccctcccacccagcctgtggcaaccacaattctactttctgtctctatgaatttgactaccctagatatgttatataagtggaatcatacagcatttgttctttgtgtctagcttaatttacttagcctcgagattcatctatgttatgttaagaattcccttccctttttaaggctgaataatattacacacacacacacacacacacacacacacacacacacactatattttctttctttttttttttttttgagacagagtttcattcctgttgcccaggctggagtgcagtggtgcaatcttggctcaccacaacctcccgcttctgggttcaagcagttctccagcctcagcctcccgagtagctgggattacaggcatgtgccaccacacctggctaattttgtgtttttagtagagacacagtttctccatgttgatcaggctggtgtcgaactcctgatctcaggtgatcctcctgcctcggcctcctaaaatgttgggattacgggcatgagccaccactcctggccgccatattttctttatccatccatcagtggacatttgaattgtttctagcttttgactactgtgaacaatgcagctacaaacattggtgtgtaaatctctaagaccttgttttcattcttttggatggaagaatggactacccaggagtggaagtcccaagatcagcagtttgcaagctgtagtatcaagagaactgataatatatttccacactgagtccaaaggcctgagaaccagaagaggcaatggtgtaagttctagtttaagttcaagtccaaaggcagggggaaactgacgtcccaggtcaaagatcagatcagatacagtgaatccttccctactcagccttttgttccattcagggccttcaatgggttggatgaggcctactcacattggggtgagcaatctactttactgagtctactgattcaaatgttaatctcatcctgaaacaccttcacagacacacccagaataatgttttatcgaatatttgggcacatggtggcccagtcaagttgtcacataaaattaaccatcacatatgcaaattctctgtttaatattttaaggaaccaccatattgttttttatagcagatgtaccattttactatccctccagcaatgcacaatagttccaatttcctcacatccttgccagctcttgttgttttctggttgttgttgttgtttttttaatagtagccatcctagtgcatatgaagtatacttcttccatcatgggtataatttttatttccctaatgattagtgacattgagcatctttttcatgtgcttcttggccatttatatatcttatttgaagaaatgactattcaaatcatcaatttttattattattatgttttaagttctagggcacatgtgcaccacgtgcaagtttcttacataggtatacatgtgccatgttggtttgctgcacccatcaactcatcatttacattaggtatttctcctaacgctatccctcccccaggcccccgccccacaaaagtcccagtgtgtgatgttcccctccctatgtccatgtgttctcattgttcaattcccacttatgagtgagaacatgcagtatttggttttctgtccttgtgatattttgctgagaatgatggtttccagcttcatccacgtccctgcaaaggatataaactcatccttttttgtagctgcatagtattccatggtgtatatgtgccacattttctttattgcgcctattattgatggacatttggggttggttccaagtctttgctattgtgaatagtgccgcaataaacatatgtgtgcatgtgtctttatagtagcatgatttataatcctttgggtatatacccagtaatgggatccctgggtcaaatggtatttctagttctggatccttgaggaatcaccacactgtcttccacaatggttgaattaatttacactcccaccaacagtgtaaaagtgttcctatttctccacatcctctccaacatctgtggtttcctgactttttaatgatcgccattctaactggtgtgagacggtatctcattgtggttttgatttgcatttctctgatgaccagtgatgatgaccattttttcatgtgtctgttggctgcataaatgtcttcttttgagaagtgtctgttcatatcctttgcccactttttgatgggtttgtttttttctggtaaatttgtttaagttcattgtagattctggatattagccctttgtcagacggagagattgcaaaaattttctcccattctgtaggttgctgttcactctgatggtagtttcttttgctgtgcagaagctctttagtttaattagatcccatttgtcaattttggcttttgttgccattgcttttggtgttttagtcattaagtccttgaccatgcctatgtcctgaatggtattgcctaggttttcttctagagtttttatggttttaggtcttatatttaagtctttaatccatcttgagttaatttttgtataaggtgtaaggaagggatccagtttcagctttctgcatatggccagccagttttcccaacaccatttattaaatagggaatcctttccccgttgcttgtttttgtcaggtttgtcaaagatcagatggttgtagatgtgtggtgttatttctgaggcctctgttctgttccactggtctatatatctgttttgatgccagtaccatgctgttttggttactgtagccttatagtatagtttgaagtcaggtagcgtgatgcctccagctttgttctttttgcttaggatcatcttggctacttgggctcttttttggttccatataaaatttaaagtagctttttccaattctgtgaagaaagtcagtggtagcttgatggggatggcattgaatctataaattactttgggcagtatggccattttcacaatattgattcttcctatccatgagcatgggatagtcttccatttgtttgtgtcctcttttatttcattgagaagtggtttgtagttctccctgaagagatcctttgcatcccttgtaagttggattcctaagtattttattctctttgtagtaattgtgaatgggaattcactcatgatttggctctctgtttgtctcttattggtgtataggaatgcttgtgatttttgcacattgattttgtatcctgagactttgctgaagttgcttatcagcttaaggagattttgggctgagacgatggggttttctaaatatacaatcatgtcatatgcaaatagagacaattttacttcctcttttcctaatcgaataccctttatttctttctcttgcctgattaccctggccagaacttccaatactatgttgaataggagtggtgagagagagcatccttgtcttgtgctggttttcaaagggaatgcttccagtttttgcccattcagtatgatattggctgtggatctgtcataaatagctcttattattttgagatacattccatcaatacctagtttattgagagtttttagcattaaaggctgttgaattttgtcaaagaccttttctgcatctattgagataatcatgtggtttttgtcattggttctgtttatgtgatagattacatttattgatttgcatgtgttgaaccagccttgcatcccagggatgaagccaacttgatcgtggtggataagctttttgatgtgctgctggatttggtttgccagtatttcactgaggattttcgtatcaatgttcatcagggatattggtctaaaattctcttttttgttgttgtgtctctgccaggctttggtatcaggatgatgctggcctcataaaatgagttagggaggattccctctttttctattgattggaatagtttcagaaggaatggtaccagctcctctttgtacctctggtagaatgtggctgtgaatccatctggtcctggacttttttttttggttggtaggctactaattattgcctcaatttcagaacctgttattggtctattcagagattcaacttcttcctggttcagtcttgggagggtgtatgtgtccaggaatttatccatttcttctagattttctagtttatttgcatagaggtgtttatggtattctctgatggtagtttgtatttctgtgggatcagtggtgatatcccctttatcattttttactgtgtctatttgattcttctctcttttcttctttattagtcttgctagtggtctatcaattttgttgatcttttcaaaaaaccagctcctggattcattgattttttgaagggtttttctttttttttttgtctctatctccttcagttctgctccttatcttagttatttcttgccttctgctagcttttgaatttgtttgctcttgcttctctagttcttttcattgtgatgttagggtgtcgattttagatctttcctgctttctcttgtgggcatttagtgctataaatttccctctacacactgctttaaatgtctcccagagattctggtatattgtgtctttgttctcattggtgtcaaagaacatctttgtttctgccttcatttcattatttacccagtagtcattcatgaactagttgtttgatttccatgtagttgtgcagttttgagtaagtttcttaatcctgagttctaatttgattgcactgtggtctgagagacagtttgttgtgatttctgttcttttacagttgctgaggagtgttttacttccaattatgtggccaattttagaataagtgtgatgtggtgctgagaagaatgtatattctgttgatttggggtggagagttctgtaaatatctattaggtccacttggtccagagctgagttcaagtcctggatatccttgttaattttctgtctcatttgtttgtctaatattgacagtggggtgttaaagtctcccattattattgtgtgggagtctaagtctctttgtaggtctttaagaacttgctttatgaatctgggtgctcctgtattgggtgcatatatatttaggatagttagctcttcttgttgcattgatccatttaccgttatgtaatggccttctttgtctcttttgatctttgttggtttaaagtctggtttatcagagaccaggattgcaactcctgggttttttgtttttgttttccatttgcttagtagatcttcctccatccctttattttgagcctatgtatgtctttgcatgtgagatgggtctcctgaatacagcacactgatgggtcttgactctttatccaatttgcccgtctgtatcttttaattggggcatttagctcatttaaatttaagattgatattgttatgtgtgaatttgatgctgtcattatgatgctagctggttattttgcccgttaattgatgcagtttcttcatagcattgatagtctttacaatttggcatgtttttgccgtggctggtactggttgttcctttccatgtttagtgcttccttcaggaaccgttgtaaggcaggcctggtggtgacaaaatctctcagcatttgcttgtctgtaaaggattttatttctccttcacttatgaagttttgtttggctggatatgaaattctgggttgaaaattcttttctttcagaatgttgaatattggccgccactcttttctggcttgtacgttttctgccgagagatccactattagtctgatgggcttccctttgtgggtaacccgacctgtctctctggctgcccttaacattttttctttcatttcgaccttggtgaatctgagaattatgtgtcttggggttgctcttctcaaggagtatccttgtggtgttctctgtatttcctgaatttgaatgttggcctgccttgctaggttggggaagttctcttggataatatccaagaagagtgttttctaacttgcttccattctccccgtcactttcaggtacaccaatcaaatgtacatttggtcttttcacatagtcccatattttttggaggctttgttcatttcttttcactcttttttctctaattttgtcttcctgctttttttcattaatttgatcttcaatcactcatattctttcttccgcttgatcaattcggctattgaagcttgtgcatgcttcatgaagttctcgtactgtggttttcagctccatcaggtcatttaagctcttctctacactggtgattctagttagccattcatctaactttttttcaaagtttttagcttccttgcgatgggttagaacatactcctttagctcggagaagtttgttattaccgaccttctgaagcctacttctgtcaactcatcaaagtcattctctgtccagtttcgtttgcttgctggaaagttgtgttcctttgaaggagaagaggcattctggtttttggaattttcagcctttctactctggtttctccccatctttgtggttttatctacctttggtctttgatgttggtgacctacggatggggttttggtgtggatgtcctttttgttaatgttgatgctattcctttctgtttgttagtgttccttctaacagacaggccccccgggtgcaggtctgttggagtttgctcgaggtccattacagaccctgtttgtctcggtatcaccagcagaggctgcagaacagcaaatattgctgcctgatccttcctctggaagcttcatcccagaggggcccctgcctgtatcaggtgtctgtcagaccctactgggaggtgtctcccagtcatgctatacaggggtcagggacccacttgacaaggcagtctgtctgttattggagctcgaatgtcatgctgggagaaccactgctctcttcagaattgtcaggcagggttgtttaagtctgcagaagctgtctgctgccttttgttcagatatgccctgcccccagaggtggaatctagagaggcagtgggccttgctgaactgtggtgggctccacccagttcaagcttccctgccactttgtttatactgtgagcatagaaccacctactcaagcctcagcaatggcggatctccccatccctaccaagctccagcatcccaggtcgatctcagactgctgcactagcagcgagcaaggctctgtgggcataggacccgccaagccaggcacaggagggaatctcctggactgccagttgcaaagaccatgggaaaagcacagtatttgggctggagtgtaccattcctccaggtacagtcactcatggtttcccttagctaggaaagggaaatcccctgaccccttgaacttcccgggtgaggtgatgccctgccctgcttcggctcaccctctgtgggctgcacccactgtccaaccagtcccaatgagatgaaccaggtacctcagctggaaatgcagaaatcacccgtcttctgcgccaatctcgctgggacctgtagaccggagttgttcctatttggccaccttgaaagtgaccctaaatcatcaattttttaattggattgcttggtttctttggtgtggttgagttataggagttctttctatattctagatgctaatctcttatcagataaatgatttgcaaatattttctcctaaaaacaattgttcaagttgacatgttgatatagtttgaatgtatattcccaccaaatttcatgctgaatgataacccccaatgttggaggtggggtctggtgggaggtgtttggatcatgggggcagatctctcatgaatggcttgggccatcctctttggtaataaatgatctcttggtctgagatctggttgtttaaaagtgtgtggcatggcccctactcttgtgcttactcttgttcccgccatgtcatgtgcctgctcgccctttgccttccaccatgattggaagcttcctaagacctcccaagaagcagatgctgatatgcttcctgtgcagcctgcagaattatgagccaattaaatatattttctctataaattatacagtctcaggtctttctctttctttcttttccttccttccttccttctctctctttcttctctgtctttctttctttctctttttctctcttctttctctttctctttcttttcttttctttccttttctttctttcgagacaagatctcactctgccacccaggctggcgtgcaatggcttgctcatagctcactgcagacttgatttcctaggctcaagcaatcctcttgcttcaccttcccaagtagctgagactatctgggtaggtgtgagctatgaggtgtgagccaccacgcccagataatttttaaactttttgtagagatgggtttttgctatgttgcccaggctgttctcaaatgcctggcctcaagcaatcctggccccgtaaagtcctacaattacagccgagatccgccatgctctatttctctattgcaatgcaagaagggcctaacatacatgtcttaattgttttttaagccagaagacatgtcatcaacaaaattcatatgttcaagccttaacgttcaatgtgactatatttagacatagagcctatgagaaggtgataaaggttaaatgacatcataagggttagaccctaatcctatagaactgatgcccttataagaagagacagagcagccgggcgcagtggctcatgcctgtaatcccagcactttgggaggccaaggtggggagatcacttgaggtcaggagtttgagaccagcctggccaacatggtgaacctccatctctattaaaaaaatgcaaaaactagctgggcgtggtggtgggcacctgtagttccagctactcgggagcctgaggcaggagaattgcttgaactgggagatggaggttgcagtgagccgagatcacgccactgcactccagcctgggcaacagagcaagaccctgtctaaaaaaaaaaaagaggcagagcctgggtacagcagctcacatctgtaatcccacactttgagaggctgaggtgagaggatcacttgaggccaggagttcaagaccagcctgagccacaaagtgagatcctgtctctataaaaaataaaacttagccaggtgtggtagtgtgtgcctgtagtggcagctactcaggaggctgaagctggaggctcatttgaacccaggagttggaggttgcagtgagctatgattgcaccactgtactccagcctgggcaacagagtgagaccctgtctcaaaaaaaaaaaaacaaaaaaaaaaccctaaaaaaaaaaaaagcagaacaggcagaggtacaaggctcttggtctgtctgtctgtctgtctgtctgtctctctctctctgtctttctcactctctgtctctaccatgtgaggacacagtgaaaaacaggccatctgcaagccaggaagaaggccctcaccaagaacaaaaccagctgatatcttgatcttggacttttcagcctccaggaatgggagaaataaatttttgttgcttaagccacccaatctgtggtattttgttatggcagcccaagctgactactatgacgtatattttatgattaaactagtgatacatgctgatgggacagtttcaacaaacataaaaggaataaagaagtaaaaatcatttgaaaccctgaaacccggagataatcatgttatgttatgcatccttccaggcttcttcctatgcatgtagaaaacttttcacaatccagatgctgttttgtaaccttttcttagcaataaacacaagtgtacatgatggttttgttttggtttgtttggtttttttgagacggagttttgctcttgttgcgcaggctagagtacaatggcgtgaccttggctcactgcaacctctgcctcccgggttcaagcaattatcctgcctcagcctcctgagtagctgggattacaggcatgcgccaccatggccggctaattttgtatttttagtagagatggggtttctccatgttggtcaggctggtcttgaactcctgacctcaggtgatctgcccacctcagcctctcaaagtgctgggattacaggcacgagccaccacgcccggccacgtggtcgttttaatgcactgcaaaatactccactgaacagatctaccataatgtatttaatcagtcccctagtgatagagatgtaggtgatttctaatttatcattattgtaaacaatgcttcatgaaggccttttatgtatatctttgcatgtttgtccaatttgttcagtgggatgaattcccagaaattaaatttctgggccaaaggatatgcttatttaaaatgttgacatcctgtatattgccaaattaccttccagaaaggctgaaccaatttatactcctactgtgcatgagagtgcccactgctccacacccttgccaaactggcatgctttcaacagcagtaaaaataggttcttgtctgcttttctcctatgagtcctaccaagtgcatgatgtgaaagtgaatgagaggaatataaagttgacagatgggaggtattttggtcactgtaatgttttatctaaagcacaccattttcctctcaaaacaagtgtgatagataagcccccttcattttttagtacaagttctaggacataatttcctaaatggattgattccttagagaatgaatgtctctgaggatgtggaaattattcaagccaaatgtgctttgggctgatagaggatatacaattttgacatagcagtatctatgtgacctcttttttaaagatgcaaagtataatatttttgccctgtgctatccaaagtgtcatactgcagcctactctgaatgtactcattcatttgcctgaagttcccacagagaaaagttttctctgactttgttttatattgaaaaagttttttaattgaagtataatttacacacaatatgaataatttttctctttaaaatctgattgtgaataactgcaaccttcatagataacctttcattacattaaatgagagagaaaagctcttttttttcctcgagacagagtctcactctgttgcccaggccggagtgcaatggtgcaatctcggctcactgcaacctttgtctcctgggttgaagccatcctcctgtctcagcctcccaagcagctgggattacaggggtacgccaccacactcaactaatttttgtatttttagtagtgacaggactttaccatgttggccaggctgatctcaaacccctgacctcagctgatgctcctgcctcagcctcccaaagggctggaattacaggtgtgagccttcgtgcccagcagaaaagcttataattaaacacacactctttgaaaagcacagagaaaagagaatggagttttacatgcagctatttcactccttagttgtatggtctgaagcacataatttagcacaatacgcttcttttactctcatctgataaactagcaaaatgaaatctacactaccttctccatagagatgttggaagcacatccaatatctctaggaaggtccttagcactatagtgagttaaattatatatatttttaaaaatgtgcatccagtcaaatatatctaatctacttgtatctgatcttaaagtttttgtgcttgaggggaatgtatttctttttcaaatgaaaacatgttgatcagataaatgtttacgatggaaaattatccttttgttttggcattaatgtcaattaaaagcattctgaaactgttcagcttcactgatgatattaatgaaccttacatgagaaaaagccagaaaataattagcataattataaaatgtgaactgtacattaataattctctttgttttttcccttttagccacttaataaattgtgtgtatcaaattattataaatgtggtacttctgatgttagcagaattatgttttaaaaggcataacaataatatttgtttaatttagaaaaaagaaagatcactttacatcctgttatcctagtgatactgtgaatacaattggttaatgcaaatataattcatactactgaattgtacacttaaaaatggtaagatgataaattttatcatctttataaattttcaaatttatattctaatatcgtctttctttttatttatttatttagagacagggcttgctctttcacccacctggccagagtgcagtggcactatcatagctcactgtagccttgacctcctgggctcaagccatccttctgcctcagcctccctagtagctaggactataggctctcagcaccacacccggctaattttgttttgttgctttggtagagatgagttctctccatgttgcccaggctggtctgagattcctggtctcaagccctcctgccttggcatcccaaagcactgggatcacaggcatgagagccttgccctaatgtgcctgcctgtctgcctgccttccttccttccttccttccttccttccttatttctttcttccttcctcttttttttttcttttttttttttttgagacagaatcttgctcagtcgcccaagctgcagtgcagtcgcacaatcttggctcactgcaacttctgcttcccgggttcaagcaattctggtgcctcagcctcccaagtagctgggattagaggcacgcaccaccatgcctggctaatttttgtattttcagtagagacagggtttcaccatgttggccaggctggtctcaaactcctaggctcgagcaatccacctgcctgagcctctcaaagtgctgggattacaggtacccagcttttctttcaacacactggttaggggtgaatgcttatcccctcagctctctgtctgctccccacgagtgacagcttgggatgcttgggcttcttcccttgtctcactctctcctcgggaaaaagcaccttctttggcaagattgagggaaagaattgctaaatgtgtgactcagcccctctttctctctgagtggccagaccttaaggacttgacttaccttgcaataagtttcctagagtaagccctgccctgcaaaaaggactgaagttagaagaggtttattttaattcagggaagtgagtatcagtaagcccatttggccacagactatgccacattctccaaccagctttattagctgtgaactaatgttttttaaaaaataatttttattgtggtttaaaaaaatagatgacataaaatttatcatcttaccatttttaagtgtacaattcagtagtattaattatatttgcattaaccaatctctaccagtctccagaactttttcctcttgcaaagctgaaactctatatccattaatcaacaattcatcattttcccctccttccagccgttggcaaccaccattctactttctgtgtctatgattttcactactctagatacctcataggagtggaaccatgcagtgtttgtcctttttgtgactggctcatttcacttagcatgatgtcttcaaggctcatccatgttgtagcatggtgtcagaacttccttcctttttaagactgacattttgagctcccagattccctgcttctatgtctccactgactcaaaactgagagctagagggagggtgtaactaattttcatcccctcaagccccatccaactggataatagtgtgttgtggtagacatctattgttttctctggccagggtcaaatagcaaatctggacagaggtaaagtgagactttactcaaaagggttattgcagtaagaggaagaggactattataatagagagaatgctctgatggtcaactgtaagatctgcaagcatctccaagaccaggcagaaaagggcttttcttttacagggaggaggaaagcaggctggaaggaagcaggtgaggtctaccaggatgagcaggttatcctgcggtgcgtcagggaacagttccccctgctgggtacgctagtctcagtaggggccattaaggagggcttgttcctagctctaatgtttaagggtgggccaagttcagggacttggaagaatgacagaggcctgactaaagtttagcccagttagcaggcattttgtccagattggcctgtggaaacaaacaggtcagctaatcatttatgagtcaaagaatgggaaattagaggatctctatatggctttgtcatagttagacaagggggtcactccaagtctctaagtcgtatggggaagggcaattatttgctgtaagtcatttcctggaacacaaaggttggagggaggctgggcgcagtggctcatgcctgtaatcccagcactttgggaggcagaggcaggcagatcatttgaggtcatgagtttgaaaccagatggccaacatggcaaaaccccgtctttactaaaaatacagaaattaaccggcgtgatggtgtgcacctgtagtcctagctacttgggagactgggggaggagaatcacttgaacccaggagacggaggttgcagtgagccaagatctcaccactgcactccagcctgggcaacagagcaagaccttgtctcaaaacaaaacaaaacaaaacaaaaaagttggagggagatggtttcctgatccttgctgttttccaggggcacagggcttgacgttgtcactaataccctttcctactccaggtgttgacagaacccctctttctcatggaaaatccacctcacttattttgagtgaggctgatcccactttctactcatacggatggacatgtggcccaggccttgccaattcaaatcacttattctctgattagtattattgctccagcaaatatgtagatgctccaagcagtaccgatcagtctctcctgagatttgatcatgtagatgctgggagagaaccctgatatgaacccagccatgcctagcttaggtctacctccagacttcccagttatgtgaacaaataaaacccctctttgcttaactgtgtgattcttttgttatcccccaccccacaaataactatgttgtgggcactgaggccttgttggcttggggtgtttgaaggatcctggctacctctgattctggaggatttcaagggtcttattttagttccaacagtgagactgttgactgcagagttgtggctctatttcaagcttgagtaatttcatctgccctccttgaaaaattttactgcaagatatttaatattctttcttccttcatagacttctaaacatcatggaatctccttgatcatgtttcactattcaaaggtaagtcctggctggatgcagtggctcatgcctgtaatcccaaaactttgggaggccaaagcaggtgaatcccttgagcccaggagtttgagaccagcccaggcaacatagggagagcctgtctctacaaaaagtttaaaaattagctgggtgtggtggcgtgtgtctatagtcccagctactcaggaggctgaggtgggatgattgcttgatcccaggagatggaggctgcagtgagccaagaggtctcacccctgctttggagggaaaaaatatagtatcccaacataaattttttaaaaaaatcctgtttttcctttaaaaaataagctgtaatgccctagatgttaaattgattttcaagttattattattatttttaatagaaatgggatctcatgctgtccccaagctagagtgcagtggtataatcatagctcactgcagcctcaaactcttgggctcaagagatcctcctccctcagtagctaggactacaggtgcatgccaccatgcccagctaagttttgttttgttttgtttttggtctggtagagataaggatctgaatatgttggtttaggaacacctggcctcaaacgatcctcctgcctcggcctcccaaagcactgagattacaggcatgagccaccacaccaggcctcgagttctttttgataaattatatgaacaatagattaacataaagaatggaaggaatcgtttttgcgagttttcagggatagtgcatgaaaaggcctcatagaagaaataaaatggggacactcatataaaccacaaagctttagtttacatttgacattttcccaacttcaacagatagatctacttaatgactagattgatctggtaaattagaaaagtcatgaaatggatcatgaaaatgatttaaaatgttttaattatggaagggaaaaaataagaaatagcagctaatcttcctaagtaaatgtgaaaaaaaaaaaaaaggtaatttaacaaatattcctggaatgccacttatgtgctagtcactggggatatagcaatgaacaacacagacaaaattttctgccgtcatgaatcttctagtaaaaaatgcaccaataaaataaaatgatgaatctccaagaataaacaacatttgtgttcccaaggcaagggagcctttcactgacttgacattttgctgctctctgtttgctggaaattgccctataccagcctgggcaacatgacaaaaccccatctctaccaaaaccacaaaaattagccaggcatggtggtgcatacctgtggtcccagctactcaggaggttgagatgggaggatcacttgagcccaagaggttgagatcgcagtgagctgagatcacgccactgcactccagcctgggtgacaaagcaagactctgaaaaaaaaaaaaaaaaaaagaaggaaggaaggaaggaaaaataaattgtactataccaaaatgttacagtgttcatctctgagtgatttttttatttctccttaatattcttctgcattttccaaattttctacaataagcttctattactttttaatcagagaagtaacttattagggggaaaaaaccctaataaactagaagttgaaatccttcagtgcagagggctgacctgaatacttgcctttggcaccttcctgaactgaaaaagtctaaaaagcaggacttgttgctttcactttgggtaactgtccccctccctcctctcattcttgagctttcctgatgtatcctaaagcaatttgttttatagtatcacatacctttttttttgttcacttttaaacattctgggtgcctagagccttgtctctttcttgcctctctctctcttcttcctgactacctggttcttctgaccttttctctacaaagatcaccactgttctacctctctgtggaccagataaaccctattactccacattgcccttgtcccttccaagtctaactaccacttttcaacaaactgaactctctctcggttactatggcatcccctgaaaaaatgtcagtcaaagctttctcctatacgcttacatttctaaaagttgtttaacaaatttacgaaagaatttttttagcccctgatgggccgaagcattatgttacagtctttgagaacttaaggtcataatagataattctttcattttgttttttataattggtttaatcagaattttattgttacaatcaatagttgctttacttttctctctctttagtttaaagaaatccctagcagtttccctatttttttttattggttcttagtatgaaagttgcattgacttttttttttttttttttttttttttgagatggaggtttgctcttgtcgcccaggctggagtgcaatggtgtgatctctgctcactgcaacctctgcctgccgggttcaagcgattctcctgcctcagcctcccaagtagctgggattacaggtgcctgccaccatgccaggttaattttttgtagttttaatagagacagggtttcaccatgttgaccacgctggtctcaaactcctgacctcaggtgatgcacctgcctcagcctcctaaaatgctgggattacaggtgtgagtcaccacacacagccacattgacttttatcaatgtaaagggagaagtcacttgatatttaggtaaattgtttaatagtattttatctacttttttcaaattggtaaggtgtatttttcatgccttaaaaatgtctttattgaagtataacatacagtaaaatacatttagtgtatttagtgagctttagtgtacaactcagtttttttttttaacataggtatattcccatttaaccaccaccagctcaagacacagaacactcccagcaaccccacaatttctcttatctcttcccagtcaatatcctcttgccccatactcctagcctactcttgccagaatagttaccactattctgacttctatcaccatttataagttttgcctatttttaaacttgaaataaacagaaccacccagtatttactcttttgttttggcttctgtaactcaacattattttcctgttcagttgcgtcatcatttttttcttttttattactgtatggtattccattaaataaatatacttcaatttatatatctattctcctgttgatggacatttaggggtttttcgattttttagtatgatgagaaaagttattacaaacattcttgtacatgtctgttggtggacatatgcactcatttctcttgggtatataccaaggggtggaattgctgggtcgtagagtagacatacttctacttttggtaaaattcttaacatatttgcatggcacaaaattcagcaggcacaaaagagtgtacagtgaaaagtctctctcttatctacatctcagttctacagttctcttctccagaggaaaccatattaccagtttcttacggaaacatactttgtatatagaagtatatgtatgtatagtcttgtgttttacaccaaagctactacacaatccaaactcctttacaccttacttctttcactaaacaatttatctttgggattagtctatattagtaacgttgaactgcttcattccattaaagcagcggccctcaaactttttggcacaaggcactggttttgtggaagacagtttttccacagaggtcaggggctggggagatggttttgggatgaaactgttccacctcagatcatcaggcattagattctcataaggaacacacaacctagattcctcacatgtgcagttcacaaacgggtccgtgctcctatgagaatttattactgcctctcatctgacagaattcggagctcaggccgtaatgctggctcacctgctactcacttcctgctgtgcagcctggttcctaacaggccatggacccgtaccagtccatggcccagaggttgggacccctgcactaaatgactgcatagtatgctaacttgcacatctaagaatatatctgtaggatgaaaacagctttgggcatttaaaattttgccttaattatataagaaagcctgttttcccccactttcaccaacacaatgagtttgtagacattttaattcttgctagtcttaggtggaaaatggtatctcattgtacccttaaatcttaaatctcccttaatataaggaaggtctttccatatgtaaagatttatttttatttcctgacctgtaagctgtttatattgtttgtgtatttttcttcgattattttttcttattttataataattatttatatattaagggaattagccctcggtctgtgatatgagttacacttttttaaatgaaaattattttattttaattttgagacaaggtctcactctattgcctaggctggagtccagtggcacaatcatggttcactgcagcctagacctcccaggctcaagagatcctcccacctcactcccacctcagcctcctgagtagctgggactacaggtgcacaccaccacacggggctaactttttttttttttttttttttagagatggagtcttgctatgttgcccaggctggtcttgaacttctgggctcaagcaatcctcccagctcagcctcccaaagtgctgggattacaggcatgagccaccacctctagcctgaaactcatataatacatagcaatttaagctcccacatatattaatttagaaaggattgcaacttaacaaacatttattgtgccaggcactgcgaaaagtgctgaatatataataaagattgatttgtacctttaaaacacttacaatctaagaacagaaagacactcccaaaccaaatgatcattactttatcatttggtaagttttattataggatagacgtgtacactacatgcacttcaagctcaacgtgtccaaaactgagtttgttgtcttcttctaggacctctttttccattgttccgtatcacagataatggcatcattagtcactcagctgctttgtttagaaaccttggagtgatccttgagtcctttctctccttcactctcaaaatggatttgccatttatctgaaagatcattgtgaaggactgtaggaaggaggaggctggtggctgagaaactattaattgcattagtccagatagcaatcgatgaggtagcaaccatgagaatggggaagaagacagaagagggacttgatgatttttaagtatagccagtgaggaagagttggggataagttccacatttctggctgagtggatgatggaagtcatgcatagagatggggatggagtgcgtaactgtttcaggaagggaaagatacaggattcagtttagacattttgtgtttgaggtctggtgtgacaaccaaatataattttaagtacagtactgccaactcccactttcctgaggtcataaaagggcatgttactatggttaattaaaaatcgatatggataattcttaaactgtccctctttattgctcacggctttcctgggtgttcacagtcttcctgggcgccctggtcactggccctgatccagccacaccttctcacaggtactcttatgaaaattaagccctgaaataggcagaatattgtctggtttgagtctcacaactttttctcctagatagaattaaggaggcaatgaacagccaaaacagaaacaggagggagttgtgagagagtagcaaaggggttgaataatttgaagcatagttaattggcctttgaataatcagattgctacaaaagtatcagcttatttacttttgaaatattatattacccccataccaggaaaataaaggaatgagggggaaattacctataatccagtcactcccataggaccactctaagcattatgtaatactatactcgctcccattttttcccagcctccttttcaaatggttataagtcacagtgtaatcattaattgtctaaaatgaatagtggtatcctggtggcataagataatttttataagtggccttagaggaacattgaatataaagtaaatgatcattgtaccctctttaccctgctataaatcattactctctttaaggacatagaaggaaatgtgggcttatgttccaggtacctaacatacaaacaggaagtcgtgcagacctgagacagtctggtatattagcactgaaatacagctaccttttaaattagtaagaacttttttttaacttatgtatgttttgtggcatggtagcatgaaaagatcactggtcttagaggtgggagactcaggctatagtcctagctttggcattaactgtgtggtcttgggtttagttttccttctgtactaaatcaattcagatctcccgcatacctgtcagtgagtgcgttaatgtgaccctgtttgtccgtgcctgatacatgcccacccctgaagctggaggtgagatcacccctctctacactaaaaagaccttgagtcgggaaagagtccagcccccagaattccatgggatgggttgttaccagaaggggaaatggatttgagcaggcaaaaacactagatgttatctaactttgttctccgtatctttatccccaaaatgaagggattggtgtaaaaagttctattaataagtctctctagatctgccttcacaggattgaaagtacagaattgtaccagttgaagtatgaaaaaaactatgctcttcatttgacttctaatttgtggtatctactctctatgacttcagggcaatttcatgagttcagaccaggagttttaaaccaggttcctgagtgactttcctgtttttgtgagctgtctgtgtatacttcctgcagagagaatgttttattaatagcaacatatgccctgaaacaacatacttctttgaccccaacaccgtttttatctttggaaaaccgatgatgtgttactaagtgttaagaatagtttattatttactgtgcagttgccaaaccgaatttatttttactcaaactggacagtacctggctaatacaatgactcccccaaattcaagtttttcgcggcatgtcgtcttattctacaagctgggagagtgtgtgagatcaaaggaatgtgcaaacaggccggagccatggctcacgccagtaatcccagcactttggaagcccgaggcaagcggatcacttgagctcaggcattcaagaccagcctgggcaacatggagaaacccggttgtattagggttctcttagagggacagaactaataggatatataaaatattatatatatatatcatatatacacatatatcatatatacatacatatatatcatatatatacacatatatatatcatatatatgagagtttattaagtattaacttacatgatcacaaggtcccacaataggctgtctgcaagctgaggagcaaggagagccagtccaagtcctaaaactgaaaaacttggagtacaatgtttgagggcaggatcagcatggcagaaagataaaggctcggaggctaggcccatctctttttcacatttttctacctgctttatattcactggcagctgattaggttgtgcccgccagattaagggtgggtctgcctttcccagcccactgactcaaatgttaatctcttctggcaacaccctcacagacaaatccaggatcaatactctgtatctttcaatccaatgaagttaacagtattaaccatcacactggtctttgcaaaaaggacaagaattagccaggcatggtggcacatgcctgtggtcccagctacttgggaggccgaggtgggaggatcacttgagcctgggggacagaggttgcagtgagccttgattgcactactgcactccagcctgggtgacagagtaagaccctgtcgaaaaaaaaaaaaaaaaaaggaatgtgcaaacatactttaagcataattttgccctgacaactcttttttccccaatctctacttgaacgattatttttaatgggactggctctgacaaaataatcctcacaggacctttaaattacataattaagcagaataaaacaatgtataataaaaagtttcctgttcttcaattctaatagcaaatttgcatatatattctctccattagcaaactgggataataatagtggctctctatctcagaaggttgttgaactgattaaaacgagataatgcatgtaaaatacgtggcacaatgtttgatgcaaacaaaatggccataaatattagctattactgttttaccatccataaaaagaatataatgcctacctcagagggtgattctgatgatcgaaagggatacaaagtgtttaacaggccagcacagtggcttcacgcctgtaatcccagcactttgggaggctgaggcgggcagatcacctgaggtcaggagttcgagaccagcatgaccaacatggagaaatcccatctctaataaaaacacaaaattagccaggtatggtggcgcgcctgtggtcccagctacttgggtggctgaaatgggagtatcgcttgagcctgggaggcagaggttgcagtgagtctagatctggccactgcactccagcctgggagaaagaacaaaaccctgtctcgaaattaattaatgtaattaaatgtttaacatatgtttaaaacacacatatataagcatataaagtgtttaatatttaaaaataatttctgctgctgctaatagaagaaatttgtggctgtttttaaggaataatagaatttccaaaatcagtgtctagcaacatttaccttactcatgaatttaaaaaaaccttctgattagaataccagtttcactgctgtttaatagtttaaccctattttgaatcagcaaattagtgttatggttaattttatataaaacataatgaaatgcatgtcccagctctgtcatcaagcagctattccatcttgggcacattcttaatgtttctaggccttccttaccttatcttttaaagggctattataatacttatcttgtgtacttcccatcataataataaaatattatgtgaggttgaaaatttccttatctttaaaagggctataataatacttatcttgtgtacttttcgtcataataataaaatattatgtgaggttgagttgattaaagaaccttgtaaagggtcaaaagaataacaatctggcagggagcggtggctcatgcctgtaatcccagcactttgggaggccgaggcaggcagatcacctgaggtcgggagtttgagaccagcctgaccaacatggagaaaccccatctctactaaacatgcaaaattagccgggtgtggtggtgcatgcctctaatctcagctactcaggaggctgaggcaggagaattgcttgaacctgggaggtggaggttgtggtgagccaaggttgggtcattgcactccagcctgggcaacaagagtgaaactccgtctcagaaaaaaaaaaaaagtaacaatctaacaataatttcttgacttgtcatgtaccaactaaatgccaagcctatgctaactgctatatttatattgtctcatttaattctcacaacagctccattaagtagttgctatttttatgtttattttacaaatgaggatcctaagtcttagagatgttacgtaacttgcttaaagtcacatttcatattaaatgtgcaaataaacatctattcaaactccagattactcttaacctttctactataaaaatgcaagttattattatttttgtataataagcagttttttttaatgacatcgtggtagggaagcccatagaggtgattattcaaatagtaattttttttttttatgagacagagtctcactctgtcacccaggctggagtgcagtggagcaatcttggctcactgcaacctccgccccatgggttcaagcaatcctcgtgcttcagcctcccaagtagctgggactgcaggcatgtgccaccacttccagctaatttttgtttttgtttttgttttgagatggagtcttgctctgttgccaggctggagtgcagtggtgcgatcccggcttactgcaacctctgcctcccgggttcaagcgattctcctgcctcagcctcctgagtagcagggactaaggtcgctagccaccccacccagctaattttttttgtattttagtagagaagggttttcaccatgttggccaggatggtctcgatctcctgacctggtgatctgcccgcctcagcctcccaaaatgctgggattatagacatgagccaccacacccagcctaattttcgtattttcaatagagacgaggatttccatgtctgtcaggctggtttcgaactcctgacctcaggtgatccacccacctctgcctcccgaagtgctgggattagtcatgagccacctcatccggctcaaatagtaatttactaacacattttactcacacatttctgacatttttaagggaacagtggtaaataaaaatgactactccttgaaatatgtgtttaattttctagggagaggtggatcttgttcctttttgaagtaggagccaggctagccagtgttcccttctcctctaggagccatacacttgatggacataaaacattgcagagaaaacagaagccctttcttctaaaaagattacaactcatatttgcttcaaataagacctgaaatagctgctcactcctaaaagagtatctgaactttatgggaaaagaagagcaccatcaagtaggcaaccattcctggggagaagttgatttggctatcaggttaaataaacatcttt

SEQ ID NO: 4 - DNA, 401995 bp, Homo sapiens
  source 1..401995: mol_type = other DNA
attataacagccaatgcagccgccatccacgcacaagcaaagaagcatgtcccatttaaatacacccacgcagccccagcgcccttagccgatcggggcgctcagcccacacgcaccgctgctcggggcttggagatccgcgcaggctgggctcccggacccggcggaccgacgcgcggaggatcgggatccggcgctgtggggctggggtgggcgggggaggctgggcccggggcctctggcgcgacacccgcatgaggacgcgagtgaaatagaccaaggtggaatttccaagggaaaagcttcggggtggttttggtccatttctccagcgaagaagtagacatggcgagcgactccccggctcgaagcctggatgaaatagatctctcggctctgagggtgagcaggacgttttctggtttctttccagtggtttgggttagggtgaatgggctcggtgcgtggactgggggctggggctggggcagggggacagcagcgggagaatgcgtcggggagggaacctggattcccgttttgattcggggttgctgaggtgctcctggctgagcccctacggcaggggctgtgcggtacgtgtcttcctctggccgtggcttaggctctcccgagggctcgtagagcttatgccagtttcatcttataccggtgtaagagcattaaaatgaaaggcgtgtgtgcgtgtgtgtgtgtgtgtgtgtgtgtgtgtacacgccccgggcagttgtctggtgccaaggcgcgagacccgactgtcccttctgcaaaaagaatgccagcgtgaataaaggcactggcccctcacgttttccagctacctgcaagatgacattgtgaggctggctgtccccgcgaagccgaacctgccgctccaagggggcagttattgctatgctggtcttgtagatggcaactgcctccccctcccccttttctacctcccgcgcccgggcgccctctcagcgctcccttaaatgccagtctgccactcacctttatttatggctttaactcagccctgcctgttctttctgactttgtggctgtaacgtttcagttttatggctgaacttaagcaggtgaaagggatgtgttttctgcttttcctcaatcagaccggaactccctggagtgtgtgcgagtgtgtgtgtgtgtgtgtctgtgtgtgttttccccgtgtctgtggccagtcctttgtagagcacctccctccccccagccccactggtttgcgtttaccttcacgtgaattacctcagacgccgtttcattgtattgactaagacatcactgatatagaatccattttgctgttgttttgagatcagaataccaggaatccaagtgctgcttcgacgcttccccacccccaactcccgatcccaacacactcctttggggaagggggcagagctttcttgccattttaattagatgctgcctgcctggaagggggtgaggggtggggatggtggcagcagcgggtgtctgagaaggattggacaccaatttaaggactgcttcttcctctcccgaaccaaaaataaaattaaaaagaaagcgagtgcatatacttgatgtatggagggtggatgagaaggaattcatggtggctctctacagggagacaccaggatggatgaagcatggaagttcacacgccctcctgaggaatacattgttagattgatgctgaatcttggggccatttacctggattcctagtacttctgacattgccgctatctgcactgatatattaaagtgctacctttgtgatcaaagtggtactttctctttggtctccttaattaaaccttttcctccacatctctttgaataagtctttctctcttcgtcttaatctgttgggctaagagatgaggtttcagcaaggcaagtaaggagttgagaagaaacagagatgccgtttgaaatgggctgttctgatagttgggcagccaaagctcattcatgcattattacaggaagctgtctatttccctggagtggaaatgccacatcaagaaccggctgccccctgcgcagcggggtggggttggtaacagggtgggtgcattggccaggtctgtggcttcctgctttaccgactgtgtgtgttcatttgccctactttctacgctgggagttgctgccggcgagttaatcaggtggatggatggccccgactgggggtggggtgctgcgaatcggtcggaggtcggggtggggggcgggaagtggcaaagggggaaggggtctgaacaatgcgcagggcttgcggtgatttccctgggccggaatctcgaccttgctcctctactggaaagcagtctgatgtgattttaagttgggccgggacttgtcccttatgggctttttcctcgggaaggttttctgagataccaagcacggagcctgcaggcaggggagcaaccggtgagggcccactgggcggacgactgcggttcacacttgggatgtgctttcttgtgatctgtattttgaaaatatatctttgcacaattcactgaaattgctctttgtggcctgggctatcagcttagggctctgcttctgtttttctgcctgctgggaggtgtggaaacagagagggcaacagctagcttggggaccaggaactgctggctagaagacttagatgcagatgtggagacagttatatcctggagggccagggtctttgaccagtcttgtgggtgaggtgtgtctgctggagtgggtccaaaggccacataggtaatctccacaaatcagagggcagatcatctccaccttgccacatttggagaggtggcctcatctagatgagatgtctcatttgttcctaagcccttggtaaagtctgcctgctgagcccctcctggggaatgcctgacccctgaaatgcagccaaggtcagtggcttctgggagaatttgctgcagacttaccagtccctcgctgtttcggtggctctttaatgtacacagtcaatgctctttttgtaaaccctgggctcaaagcattaaaagcagatcctgtctagagaggcctttatccttctcactttgggggcttattgttctcagccagtgattccagaccggacccagtctaaattttccccaaatagcaacaatgcataatttaaaccagagcaaccaatgacagcactgatcatttaaattatgcaagatttgcatggtttaaaagtgagtgaagcaggatcttctttggttagaaaataggtactttgaatccagttttagccctgatttttagagctcagagataaactaaatcttgagggatgggctggaattgttttatagattcagagctggaaagagaattgtagaacactcagccactcctttcattgaacacttgggaaactgaagcccagaggcgtgaagtaagttgttcaaggtcacacagtaacaaggggaggggacagcgaggagcgtggtttgaggaaataatctagatttcctgactcctcattcagtgctcttttctctaagtcacactttctgtggtggaatcagaaatcaataatacattttctgcctgagtacaaaagaatagcagaaaggaataatttcaccagggtcagggaattttatttattgagaatggcgaaactacttcatgcaagtaagcttgtgatacatgaaaccatggagctctaggccacctttggaattcatcttgtccagccctggttcaatgcctactctgcaggcaaacgactgtctgaaatcacctaggacacatggttgtcctgcacaggtaacctctctgagtaacctgtgtccatcagagcatgtctcaaggggtcagtataaacatacatgttattcagatggctctgcatgtgaggtttatagagttgtgtgtatgttttgtattatctatgtggatacatatattatgtgtagtattatggatataaaccgtatccacgtgggtgtatgaaaatgtgtgtatacatacataggctacagcaaacaatttactcattcaaacctggggcttgagtcattcttgcttcaagacatctcagtattaaaagagatgaaagttgccaccagtgtgctttattacatatgaggcgagctcagcccagaaagctttttggagattagcatatttctggacctaagcaccttggctgtccttaacttggcccacagggtaaggcattcaaggccaggagttggctgctgctgacctcatactctcagcttctgccaggactcacatacacttttgtatttgaacaaaattagatgatctacacttgtctttccccttagccctcattccctagccattcctttctccattgaaacccagatttaagaattgacctcatctgaaagccttgcatacatccctttgctacacttttcatgctcatgttttacttggtgtgtgatttcctttctgcttctttactaaaccgtggacttcttgagggcagaggctagatcttgttcatctttggagccatagtctccattagttggatgaatgagtacgtgaatgaatgcttgaatgaatggagtggaatgaaccctgtctccccagttctatgtccacctcttattcactctgtgactttgggtaggacatttaaccatagttaataagaatcatcacaactgtttgcctttctcacatactggtttcaaaatcaataaagtatttaaggcaatgctttaaaaaccatacagcactgtacaaatatgctatcccatggttaagtagaatttagtgggaaaattgataccatcaacatttgattgcaatgattttatctaatagaaaattatctttcctgggcacagtggctcacacctgtaatcccagcacttcgggaggccgaagtgggaggactgcttgaaaccaggagtttcagatcatcatgggcaatgtagggagactccatctctaaaaaaaaaaaaaaaaagtcagtgtggtggtgtgtgcctgtggtcccagctaattgggagactgaggtgggaagatagtttgagcctgagaagtcgaggctgtgattgtgtcacggcactccagcctcagtgacagagtgacatcttgtttaagaaaaaaaaaagaagactaagaaaagaaggaaaataatcttcagaaaaagatatcagaaggttccgactctttttaacagtacctccacagaccttagctgcctttttccttttgtgtaccaatgtgaccttgtatgtttctttgatggcctgaattgagctttgcgcccccagtattaagcattcattacatatgaggtaagtgcagccctgaagttttttggagattaacatatttctaaactagtatcaactatcagcattgttcattaaaaccttcttttttaaaaaaagttttctctctttatgtattaccgattattcaaatacaaacacattgatcatgactgtgccttcctaaagttttatcttttcccttgggagatagagtggacacataaaatgatacactaatggcccagtatttaaaactttctggtgagaggtctcatggggctcaaagaaatctcgaaacattattagttcattactccagagcacttaattaaatttggtctaaaatgagattttagtaaagttgcatgagttgataacagtatctcaaaatgataacagcatggcaattttttcattagatattctttttatttttcagagatactaaacaggtgttttctttacaatggcattgcctcataaaaagtagggtgtgctggtatttatcagaacatcagagaaatatgcataatcattttcattattcattattaactggagtaatctttagtacaaaagccagtgtaagtcatggtttgctgtttgcataattatctacttaggaggtcatgtaatattttgttgatgagagagtacccagtacatttctttcaggaaatattccttttttcccccttatctgtaaaactctttgatatcttataatttcgagtcttgcccgttcggcctttcttctttctgtgtctctgccctggaattaatcttccgtgcccttcttgtttcgacgccattccttctctcagtgatagtggttctaaagtccacccagccaggcgctcctgtgattgaatcatggccgccatgcccagctgagcacaaccagtctctgattcccttcctgatagaatctggagtaacttgagtctgaaagatgctttaatgtcaaattgattcttacatttctgtgggggaagtagctctctgagaacagggcctaaactggtttgttagcagtgtgctgagaattctaagaaaatcttaatgatattttttgaatgaaatgttattctgcacatataaatataaggtctctagtggagagagagggaggacttaagtagaaaatgttggatgaattccgcttgtgattccttccagtctggttggaagcttatttccctttagagaaacatgattctatccactcttttttacatgtcctggttgtctcatgggggtgccctcagtttctcaaaacacattttatatcaccccaacttaaaattcttcccttaatgtttatcatatgggtccccttgtctccactgttccctgcaagtgctgtagttactgtcccctgggcaacacccgcaacaggacctcccctcctcctgtgtctctaccaccagccttcttctgactggtttctcgtacactgtagccacgtgagtcttccaaacgcacagtttcaatctggttgtttttattcaaggccttctctgtctccttagtctacagactgaaaactaaactctttagcatgttaagaccagcggcaattcagaggggcctcccaccgagctctgcagttttgacgaccactcccccattgcggcagggaacaatttcattcccccatggatgctctgtagggggcgctctgtcttagtctcctttctgtacctactgccccaacgctgaacattcgcagaccaccttttccacagaagtctctgatttctctcaagttgtccctcccactcatagactgtctcagaactgacctcacacctctttcataacactcagaactttctgtcttggattatattcactactagacaattcctttttagaggcaacgtttgattttcttagggatcctcaccagttttctttacacagcaggcgttcgttcaacaaataaattttgaattaacaaaatatatactgtgcaacccttttagaagggctggaggtggtgctatgtagagagagtatagaaacctcagaaaggtggggcctgttgctgaccatggcacaatttcagggatcatgaattacattatagtctaggttgcatgactcctggggacactttttatgtagagtacaattccagtggatgctaattacatagagtacaattccgggggcaccaattacgagaaatactatgcctggtcctgggtaggtattcctatttctagaatttttctgccaaggaaagtgttctctccattgtcttattctaagttttgagagatttaaaataccatgggttagaattgcaaggcgtatgtgtgtgtgtgtgtgtgtgtgtgtgtgtgtgtgtgtgtgtgtttggagtgtgtttcaattatttcaacaatcggataatacttatgactgctgttttgattaaacagtaatagatgggcgggaaagggtgtgcttctggggtggcccactggaagacaacgttgagtttttatcttgacagagctggcagtgagcgggtagagagagtttgggagatggtgaggtttaatgaggcacacagctgggagttagagcccagcgtcataaagctggctctgacaccttgccctctaagcttcagttttgtcacatgtaagatgagtggtttggactagaaattgctggaggtgacttccagcaatttgtattgctgggatgcatattcctggaatatgtaagggaactagaggcaggactgagggcatttaaatagccatggattcttattctatctgttggagataccaagagattgcaaactgtgcacctcaatgagctgggaattgccactgaacgtaacatccctttctaatttttaaatgagctatttttttccagctgtcagattctgatttataatttaaagtgttgttctagtttttgaagaccgagtgataggacgaagggctgactgtgacttccgctgggtactcccttacagtgttgctgctggatacccggatttagactctgaagtaaccctagattttaaagtgctgtctctctagttagtgaaattagaaccttggcagtatgcatcaagtaggaaatttgtagactttaacaatacattgcatatgttacaaacatttgtttgattagtgtattagaaggtgcaagtttgggtgcagggtaaattcaggcccagtattctgtgattctgtgaaatgtgattaactgtaggggaagaaatgcacatggtatccagcattcattcatttatttgtttgtgtatatattcattcagtacctgattattgggtgctactagttgctggggctgagctgaagacaacattggcatggtttctacacccatggttggatggagaagagagcctgcacttgtcttttactacactctagccacactgatttttttctgttttgtgaatatgccaagctcattcttgtagttctccgtgtcagaaatttcacatggagggctccatcttattatttaggtctaaggtgagatgctgcctgtattattacttatgtatctgcatagcagactaccctcaagcttagtggcctaaacaacaataaccatttattatatctcacagtttctgtgggccaggaattcagaagtggcttacctgggtggttttagcatgaggtatctcctgaggttgcaggaagattttggcaaggtgagctatcttctgaaggcttgactggagctggaggatctctttccaagatgatttacttatgtggtgctggatgttggcaggaggcctcagttcctccccacgtaggtggctccattggttgcttgagcatcctcataacatcgtgcccacttttaccagatagaggaatcaagaaagcagagcagaagccactatgtcttttatgacctagccttggaaatcacacaccatcatttctgcaataccctgttggctacccaagtcagccctattcatttcgaaggggactacacaagaatattaactaacaccagaaggcagaagtcactgagggccctcttagaggctccctactaaacagagaggctttctttgcaatatatctgtaaagtaacactcccttccaccctgaaactgtccaattcagtgctttattatctttaaggcagtcgtgactatctgaattttttaaaaatctggctgtcccaactggagcctaataagttttgtgagaatagggatcttgcctgcatgttcagcaccacattcctggtgctttgaactgtgtctggcacatgataaatgttgattgaataaatatcaattgtgtgaatgcaattaattcattcatttaaaagggatcttatttatttattacacctcatacctccaaaaagtaagttgtggcaccttctgataaaaggcataaataggataaagccataaaaccatgttaaggctaaaatgaaaagtaaagggggattgtgtttgcatatctttgtctatatatctacttatctatctgtctgcctagggcttggtgattggtgatccaatttacctcttttgtaggtagaaatttggggtcagagaagttacttgtcttgtccaaggatgaaattcgaatgcagtgctgggtcccgttataccacgtccctcaactggattgccaacatcctggacatcttagtgaatcagtcattcccacaacacaaaaaccagtctaacaaagtatggatacaaagatggttataaagttgcttgtatgtacggaacacactgaagatagcctgtgctccactgtgaagaaaccaaatctaattagatggtagaggagaactcagctaagttaatcaatatagataagtagcaatgcttcagatgttgaaaataaaggttacgattctatgtgcaaagaggccacctgtagaagctggaaatatgtgctgtatcttaacctgagtgggaagctacgaagactcctggggctccagggcccaaaaaatgcagactgtgaaagaaagcagactaagcctgctgagttgttaaaaatttgtttaattttttttttatgtttgagacggagtctcacttcatcacccaggctggagtgcagtggcaccgtgttggctgactgcaacctccgtctcctgggttcaagcaattctcttgcctcagcctcccaagtagctgggattacaggtgcccaccactacacctggctaatttttatacttatagtagagacggggtttcaccatgttggccaggctggtctcgaacttgtgacctcaggtgatccaccctccttggcctcccaaaaattttgtttaatttttaaaaggcttttctggttctcattgtaaaagcaatggtcattgcaatggtttctgcatggtcagtgcagaaaatttggaaaatggagaaaaaataaaaagaattctcaaattatttaaacttatgattcctaatgataaccacatatgcactttggtgtatggcttagtagttttttcctatgcatggataaatagattttttttaaagtggagataatattgtacatattatatgtaacctattttttaaacctaataattagccttttctcatgctattaatctttttctatggcataacttttaaaactctttttcatggggaatttaaacttaaaaggtagacagattacaggaaacaacagatgctggggaggacatggagaaataggaacgcttttacactgttgggagtgtaaattagttcaaccattgtggaagacggtgtggcgattcctcaaagatctagaaccagaaataccatttgacccaacaatcccattactgggtatatacccaaaggattataattcattctactgtaaaggcacatgcacatgtatgtttattatggcactgttcacaatagcaaagacttggaaccaacccaaatgcccatcaatgatagactggataaagaaaatgtggcacatatacaccatggaatgctacacagccataaaaaaggatgagttcatgtcctttgcagggacatgggtgaagctggaaaccatcattctcagcaaactaacacaagaacagaaaaccaaacactgtatgttcttactcataagtgggagttgaacaatgagaacatatgtacacagggaggggaataacacacaccggggcttgtcagtaaatggggggctaggggagggatagcattaggagaaatacctaatgtatatgatgggttgatgggtgcagcaaaccaccatggcacatgtatacctatgtaacaaacctgcacgttctgtacatgtatcccggaactcaaagtataataataataagtagacagaatattggaatgctcctatattactgataggaatgtaaaatggtacagccattttggaaaacagtttgacagtttctcaaaatgctaaatacagagttaccatgtgacccaggaatttcactcctaagtatatgcccaagagaactaaggacgtattcatgcaaaaaaaaaaaaaaaaaagtgtacatgaatatttatagtaacctcaaataggagacaacccaagtgtccatcaaccaatgaatgaataaacaaaatgtagcatagtatatccttacaatggaatatttattctacaataaaaggaagtgctgatacacactgcaacatggatgaacattatgctatgtgaaaaaagccaaacacgagaagacacatggttgtatgattccatttatataaaatgtctggaataagcaaatccatagagatagaaggtagactaatgcttgctggcagggagtgactgctaacgtcccaaattagatagtgcagatgtttgtacaactctgtgaaacatactaaaagtcacttgtacacttcaaaagagtaagtcttatggaatgtgaattaaagctcaataaaactcttattaaaaagtagataaaagggttaataatctctctactgaacaattatcccccataatgaatcctgtttcatctgtactcctacccaccttctcccccatattattttaaagtagcatattatttcatttataaatatttcagtagtttgtgtacttaaaaaatacataaccataatagtattatcatgcctaaaaaatttaacgtgtaataaaatattcagtcagtgctcaactttctaatcatgtttttagactgcttagcattttgttgtggagatggatcataatatatttaaccagttcctgttgatgaagcttgaggttatttctaactttccaactgataaatagtgcttcaataaacatccttatatataagtctttgtgtgcatctctgtttccttaggataactccttagaaattgaatttagaatgaaagtgtatgaatgatctctaaggctctagatattgccagattggcttccaatttcttgtgctgtaggtgtgtagcatttataaatgaacacataagactctgaaaaatcaattagtttaccaaagatcgtagagctactaagtggctgagcttacgactgactggcccaaagccactgccaatagtgactcacatagccatcatttgatttatggaccttgtcatgacatcagaattatctgttgtattatcaccctgaggctcacagacttcccagaagcctttggtttagggcacaagttgtctttcatgagcatagtggtgttttaagagctatttccaaggtatttcttccttgtaactttgttttgtaagatgaccaatgtcagattataacgtgtttttttttttttcttgcctaaaaccttaaaaacctaatatggtagctatttggggattaacagtgacattcttgtggagtgtatctaggggatgtttgtttgtttatttatttatttatttgtttgtttgagatggagtctagctctgttacccaggctggagtgcagtggggcgatctctgctcactgcaacctctgcctcctgggttcaggcgattctcccgcctcagcctcctgagtagctgggattacaggcgctcgccaccacgcccaactaatttttgtatttttagtagagataaggtttaactgtgttggccaggctggtctcaaacccctgacctcaggtgatccgcccgcctcagcttcccaaagtgctgggattaccggcgtgagccactgagcttggcttgtttacatttaaactgtcattctttctggaaaattatccagcaagtgtgtttggaggatgtgtggaatcaggctcaaaggtttcagttttttaagaattggagacagctgactctgtgatgatcatagaagatagcaaggtgagctacggccatgatagaatagagactattctcaagccttaatctgccagacaattgctaaaatcaaaatcttaagttgtgctttcagtttttcacataggtagatattttaagattctaatggagaaaatagaagatagaacaggaaaccaccagagtaaaaagctccgtattctggactataatctactttcaacctggtttataagtaagaaactattaaaattgacacaactttatggtagttggtcttgcagagggcaattttcttgatttactacagtttataacctaatcctccatttaaaatgcctataaattatttatgtctagggtaaaaatccagggcttcacatgaatatggtttcatcatttctacctctaggtattttttttaaagctgcctgtaatcaaatgatagcagtgtggtgggtggaacaggttgtaagcagtaattgcaaactgtatttaaacaataataataatatttagcatttatagagcactttatatcttcaaagtacttgcaaacattatctaattaaataccctctctgattataatctggatacaaatgcacttaaactcaggacagggtcatgagaaaagtatgcatttgaaagttggtgctagctatgctttaaaaacctatacaatgatgggaaagttagagttcagattctgttggactgtttttgtgcatttcagttcagcctgatggcagaattagatcatatctgcactcgatgactctgcttgataacttatcactgaaatctgagtgttgatcatcacactgatccttacagttgctacaacacgaataacataaataagctttaaaatgaggtccctctctacatttcatgccctggcttcagatgaaactgccattagtaagtgaaatgaagtggcatagtgcaaggaagaatggctacgcattgtggtttagtaatgtccatctgagagtaatagatttaactgcaccgtaggatacatcataaagaaatgcactggagaaatgaaacatctttagtttgactgtattaactacttcttgctgttttggatatgtgtctgtgtattgtcccctcgcacgtataccctgtgttgccaatttagatggtgtttggagcaaggacctgtgcggcttactcagtaggtagtagagagttctgcagttggtagattctcagtaaatgttatcctgcatgttgtgattttctaaaagctagttgacagtttaactccctaagtcagcagttctcaaagtgggatccttggaccagcagcttcaggatcctctgttaggccctgcctctctcaactttttttttttttttttggagacagggtctcactctgtcacccaggctggagtccagtggtgcgatctcagctcactgcagcttcgacctccggttctcaggtgattctctcatctcagctcctggggtagcaagtactacaggcatgtgccaccatacctgactgatttttgtattttttatagagaagggctttcctacgtgatctcggattcctaagctcaagggatctgcctgcctcagcctctcaaagtgctaggattacaggcgtgagccaccatgcctgggctcgctcaactattgaatcagaaactcttaggatggggaccagcaacttttgcgttaagaagccctcctagtaattcagaagcatgtgggagtctgagaaccactggcctaaatgtttaaaagatagtttccttggctgggcatggtggctcatgcctgtaatcccagcactttgggaggccaaggtggaagcttcacttgagcccaggagtgtgaaatcagcctgggcaacatggcgagaccatatctcaataaaataaaataaaataaaaaagaaaagcaaaatatattcatggaaatttgggtatgcctgaaaatgttgcagaataggaaatagtaaattatttatggtaagtgcaactttttcataaggcatatgacctcagagaaattgtggacagtacacattcttaggagtatggaagttaaaatttttttactaatatttgcatttgaattgtttgtaagactcaaagatacttgaaattgaaaagtctacaactttcaattgataattctgtactttgcattgttctttgcattgacatgtctttttctttttttttttttttttagcaagtttattcaaggtgcagaaaagccccactcccttgatcaacaagatgcatccttctgatgtcgatttcctgtttttccctataggcctgtagggattgagtttgaagccccaggaggtgctgacatttgcttggaaactgaaagaaagaatccatattcacaaattctttcagccctacttctgttagaagcctaaaatcttcgagttatttattttttgagacctgggaaatggaatgtatatttggaatctagacagcaggttgaagatttccttactgggaaatcccacagactttctttgtaacaacaacttgtaagcatctcttacctagccacaaaagtgtcccatgttgctatttaatccacagttcttagataagcacattgcttatattgcatgtctgtttatatggaggaaaagttgatggcaagtatggttgttaaagcaactttatatacaactgatagtgagcgtgcatgaaaattttatactcattgctggggaaaatgcttttaaaaatgtaaatttgaagacctcccctcatagaagaactattttgaaggaaaaaccgatggttagacaatcatcatcagactagatataaaaaatacctggttaaagattattaggtttttcccagtattgacacttagagggatagctccagttttctcagaagaggtgttaatatcattaaagtatcagggaattgttcaagcattttatttttattttattttttgaggcagggtcttgctctgttgcccaggctggagtgcagtggctcaatcatggctcactgtagcctcaaacttctgggtacaagtgatcctcccacttcagcctcttgagctgggactacaggtgtgtgctaccacacccagctaattttttgaaattttttttttttgtagagatggggggtctccctatgttgcccagcgtggtctcaaactcttgggctcagcctcccaaaagtgctgggattacaggtaggagccagtgtgctgggccctgttcaagcctttaaatcgggaatactaactgctctagatgggacaatgaatgacatcatttgaaaacttccgtctggaactaagtttggagcagtttcctttctagtggtggtgaaatcatagactctgtctaagaaagctacaaatttgaaatggctttttcacagcctgtttatctgattcctccaacgcttgagataatatatgttgcaattggcgtggttgaaagggccctttgagtttgggagtgctgcgatttttcaattgagctccaagactttcagagcatggatactctgggtagcagtggaaccaggtggttctgttgctggtgtcttactctggaatggttgacagagtcaaaactaagcatttgctcttcctaaaaggcctctgcttcttctgtcttctttaaattggtagctccagcaccagttagagagtactcagttttctttccatgcaaacaaataaacaaataaagcgctgtagtgctttctagagccaatacccagatgctattcagggaaagaacattgcacagacactctgttgtctgaacaatatgtatattctctctgggagtattttaaagatgtaacttgtgctggtattgtagccatcatttcttgaatataaacagcttttattttgggagaagaacagatgtaaaagtgtgaaatatagaagtttacacattttgggggagggggaaagggaagaggaacagtatttctttaaaatcatggtaaaccaatcttagtttttcctttgttttctttgagtgactgaaaattagcatgggaaatctgctggaacctgaccagctgggtacctaaacctccatttcactgattgcaccagaaaaagtgccagtggataattattataggtcctcatcactggaaacaaaaagggtccttcttcaggaggaagcctctctatgaagagaggaaatcgtagacattcagtgaaatatgtatgatacttaaaataaatcttagagagatacagagatccgagccccagatacagggtttgctttctagattgaaagagtctgttgaaggggtttgaaggctgggtgtccctctgtgatctctgaaccaaagctcttgccagttcagtcccccaaccccctttaattagtgtgtatgtttgcaaagagtacctgggggtattcaaagcagcagggacattcctgtgactattaagttctctgtccctttgaggccaggtctgtttcttttcttttctggaagcaaggtctcttgtatctcatcacttgatacaatgcaagttgcatcagatttaaaaaaataatcccctgtccttctttcctgtttcctccgtgtggctgctgccttctataagttgctgctggtttgcaggattcacaatcaggattttgtccctgtggagattttgtttagtttgcaaggaacatttttatttgagttgcatggttccttaataactcccctttgacaaatattctggttaaaatttctatgatcattatatttacttggttgtttagtatcgcatttttatactgaattatttcaaccatgttttcaaatggacagctctcaaaattttttaagtacatttaagtgaaacttggaatgtgcataagttgtgagatcatgtgaactctgcacttcacagacttgataaagtcaaacctttatccaggggatgcttcctccacaatacatgtaaatctgaatttaaaaatatacctaagaatatgcagaaactggaactctcatacattgccggtgggtctatgaaataactcagccactttgaaaaacagtttggctatttctgaaaaagttaaacttactacacgacctagcaagtccacttctgcgtatgtacccaagagaaatgaaaacataggtccacacagaaacttgtacaggagtgttcatgaggagcatcattcacagtggcccaaaaatggaaaccacccaaatgtctatcaactgatggataggtaaacaaagtgtagtgttttcatacaatagaatactattaggcaataaaaatgaaggaagtactgaatcaggctgcagcatgcatgaacctcaaaatgttatgctaagtgaaagaagccagacacaatgattgcatattgtatgattctgtatatatgaaatgtctagaaaatgcaaatctacggaggtagaaagtagattactggttggctagggtggagaggaaaacagggagtgcctgtaaatgggccggagggatctttttgggtgatgaaaatgcttcaatattggatggtggtaacctgagtgaattttatggtatgtaagtacctcaataaaggtgttaaagtataatatgcctgagacactgcttcatagttgaccagctccacacaccgtgaaggcaaatttcctagtcaggtctctgtgatatttctaggaaggccatctcttcaacacctggagagatagatgggttctctgatcctatcttctgctttctacgtattttcgtgtcattctttattctgaagcgcttgtcatattttacaaacataacgataatcatttccttcaagataaggtagctcaaataacttattcctcctgtagagaaaggactttggggccaggactgggagagctattcctgtctaaaaccattccttactaactctttctgttttcttaatgttccatgcttttctcacctctatgctgttatgcacactgttcctgctgcctgaaactcttcccaagcccctatcataatgtgccatttgttcatttgttaacaaattatttggttgtctccctccacaccctcttcctgcagaagagactataagctccacaaaggcaagctatgttttgtgtatccttgtatccatttattaatgaaatgaatgcctgctcgtgacttacagcataggctaaactccttaacttagcaagaccttctatgatctaaccattccctatttttctacagtatcagtaactaccaccccattccacctccatacactttatttcctccactgttacccctagagctcagctcttttgttcccacaaagttggggaattccttttctcaaatgatcagagctccttttagcatgtcatcttcctggaatcacagataccaggtgtttttcaaattgtaatgggttgtggagtgagtttaatgggttgcaatcagattttgaaaaaaaattagaatagagtagaaaaatgttcctatgtttactgttactgttactcaccattactatgatggcgagggaaggaaaggggcagtaatcaaggaggaatgagttgctggaaactgcagtagccaccatggccttgagaataccctctaggaaatgtggagaaaggaagagggcttaagagtctgcagaactgggtggaggctcagctccagtaatcattgtggtcattcgcccagcctagcatggtcttggctatcataaaaacagagggagagaaaaatcatggacactgtcatattatgtacaggaaaactgtgcaggcttctaccatgtgccacagtgaggttgagtaatggggagagtatggcccttccctcggagcagctgggagacaagagtagaatgttcatgaaaccagtggaaactgagcacatgctgagcttctgagggctgtgtgtgctaggtgttgagtgagggccaggtgggtgggtggcacaggccagtggcacatgctggccttggttagggcaagactttcagcgaggaatttgtggtccaggatttggtcctaagctttgcagttccaagaactatactgaaatgtggctaggatagagtctcaggtcacaccaacatgtggatgtacctgacactgatctggagtgtaatttatataataataatagtaatacacatgcatttaggctagtcgattgaagcagtgggagatgagaaagaacaaaatttaataccaatatttatagctaatatactttgtgaccactggccacgtgtcaagcactgggttaattattttaataaaagtctagtcttattaatgcagccacatcttgtgatatatactattctaattttatagatgtggaaagtgaggcttaggttaagtgatttattgaaaatgatggagccagtttttgaacctagtttggtccaattttttttctttttctttttttttttttgagacagagtcttgctctgtcacccaggctggagtgcagtggcaccatctcagctcactgcaagctccgcctcccgggttcatgccattctcctgcctcagcctcccaagtagctgggactataggcatccaccaccatgcccagctaattttttgaatttttagtagagacagggtttcaccatgttagccaggatggtttcgatctcctgaccttgtgatccgcctgcctcggcctcccaaagtgctgggattacaggcgtgagccactgtgcctggctagtccgattttaaaacatgaaatgtaagcattgtgctattgctgcttcccattttctaaataaatagtgggaatgcttttctaatggtagaactactgtctgctctctggggaactgtacttctgattttggagggacataggactctgaaactttgattagaaatgtgcttgacagggttggaatgaggctggggttgaacctggagcgtggagtccaaattctgatcccaccacaagtggtggttggacagggctggaaacccacacactcttccttttgttaacctgatcgagccacaaaacccctgttactaagacactttcttatgaaaaacatatcagggaggtttggttcatcatctaggtcccctggttaatgttaatccttacttttgtttttctgccttgctctgttcacactttttatcacctgcatctctgttttgcttcagaatgatttgtccacaagccattggtgtatttaaattataagcttcttaagggcaggaacttaagacactttctcaagtgacttgtttacatttgcattctgcagtgtgcctaacacgtaattcaccaggacgtgtcttctgggagtcatcgtgtttggatcctgcatccccactataactgagtggacaggcgacttgctatgcagttgtgaaaatacaatttcatgtgtttttagcctttaagaggagggattgtgattctgggaaaccaaaccttaacaaagtgcaggacccctgggaaatggaaagacctgtgtcctaggcagctgtgggtcttaatgcttgcattgttagaaacctcctaggtgctatgcaaggggaagaaactgagagggccctgagatggtgaaatggcctctactcattgctcttctatctcccctttagactttaaagtggttcattaagacaacagactataaacctctttataagtacaggctcaataaatgagacacaggtgaatttttattggcgacaagtcactgtgcaggtgcagcagttatattcccatgtctgctctatgcactctaaaaagcactgtctgtggggcagcttccccagtggctaacaggaaagtatgggaaaagacattttgccgcctcatggcgtggatagctagctagctgattagctggttatcaactccccggatttcctcagcacctgtcattagtggcacattgtaggccctcagatttttgtttaagtcatctggagccatctaattctgcttttaagaagcatgtgagcaagaaagattctttctaacacagggcatcaaatgaagttcaaacatggccttggcatgggtgacagattataggtggatttcagttacctgataggagttgagaatgatggaatctacatggtggcagatttactctcacctccctgactgttggcagagaagggcctgcctctggctggtccaatctaatatggaaggagaggatgagctgttcttcagaggctacagggtttgaataaatgcagccataaatcccagaagcagttgcatgtattagcttagacataggtcttggaggcacagggtaaaagcctcccctgcctatgcttgcatttgtgtgtttcttcgtttcatttttagcttctaaatattgattagctttagtgagtgctcactggctcttgtggttatcctacagctatagggggataaggcccatgacagttaaatggcattcctggaacagagcaaagtggaaggggtggtcaggtctgcaaaatgcagttcagcagcaaatgctatcccgatgtctcccacgttctctactgtgtacctcctactaagcttgggtgcttttttcctttacaaatgcagactgttgcactttacagtaatcagctgatatgactgcaatgaactatgacttcactggatagaatctttgaaatcaaatgtattaaattgactcttcctttctcagataataatgagtagacattccagctataaagaaagaattaatagattccaagcttttataggctttgggggcagtaataaaaaaagagaggaactggcacagatgccgctgtgcttgatttcattctttttgaggggtgttaaggttcttgacagcctcgccaaatgatccaagggggcaaatgcactggctctgtgtgaggctggggatggggatgaaaggtagatacactgtctgtttgatgcagatttgtgctgcaatgttcaaatcttcaacctgttctcagtcttttgaaaatcaaggcatgtaaatgaatgatgatagcctctagtgtctggttaggattccccagatgacaccttggcagagcatttagccagaacgtttttggcacctcagagagtaacgtgtataaaaggtgaccatgaaataatttgggctcatttgtgagcttctggcttatctcatttgttttcaaagtcacaggaaggaaaatgacttacgattacatcaggggttggactctctggatttgaatcttggtgctatagcttactagctttgcagcttgtgacaagttatgtaaaatccctacacttttctacacctatgaaatggaggtaacaataacagtacacataggactattgctggaattaaaaagacatattttatgttaagtatttatgacagtgcctgccatgttgcaaatacacaataaatgttcaatacattcaacatcagcatcactcttgcaaacaatttgagagcctactctgaatctggtgcagtgcaagcaactgggtatatgtaggtttacaaggtattaggttctgcctccaagaagttcaaagtgtagtggtaaaaacagatgtaaaaatagataaagagtattgtcagagcaccagggtagatggctagctgtataggagtggggaagatggagggaagtggaccagatggagggaaggtcaggagtgggagtttcatggagctgaaataacttaaagcaattctcagtgattcccaatgctatgatgagaatgccattgatgtaaaatattgatatagattaagtctgcatgtgttgtgtcttagaagtaagctttgtgttccttccatgctttcctgccctactgcccccactccagaacaagccatatcacttcatgtctgagttgttctgtctgtctttcttgcctgtcaccctctgattcatttctccctcttcaatttttctggcttaggatctggaaactttttatatgtgaagtattatttattaataagcaataatgtgtgtttcttgctttgtatgaaaaaccctaaaaattgctaattaacagtatggaactgaaaacacagaaaatgctatgtaagcccccttatttctgtcttaggaagtctattaatacaacatattagtagaccaaaggacattaattatgggatcatttcaatggatgtcaaaaaggtatggggtacaacttagcagttatttttgattaaaaaacaaagcaaaaactatttttaatagactaggattaaggacattctttcttaacttgataatatgtctaaaaccaatagtcatccctgtacctatcctttaaacaccagagactctctgtggtgcacactgttggttccctacccggcagtcatccccatcctttttctttctcacagagctctggatgtgttttggtgtttacctttccacattctcagaggaagttgacctccacttccccagcatgggggaggtagaatagattaagccagtcattgggattccattctttttgttgatgattggcttaagcaagtcatgcaacacaacctgtccaataagaaggccagaggaagcctcactgggggttcctgggaaggctttcctttcttttacaagtaaatatgtaaaaagatatcttccctatcctggacttggatattatctaaagactgtgatacttaggtttgctccagccatctgacaaccatgaggggaaagccaggagaatcacagaataaacgtatcaggtccctacattattgagcatctgaattaatcaaccctggaactggcctgactccagtcttcatattatatagataatacaatttccacattgtttaagccactctcagttgtgtgtttttttttacttgcagttgcaaacatcctaattaatgcatgttctttttaaagtgagggatgatatcaaggtgtcaggaatcagataataaccaataataatatataatgtaatggaaatgttagccattgaataaaggcaagacataaaagaaacaagaattataagaggatgagggccaggcacagtggctcatgtctgtaattccagtgttttgggaggccaaggtgggaggatggcttgaggccaggagttcaagaccagcctgggcaacatagaaagaccctgtctctaaaaacaattttaaaaaattaaccagatatagtggtatgcacctgtagtcttagcttctcaggaggctgaggtaggaagattgcttgagcccaggagtttgaggctgcagtgagctatgctggtaccactgtattccagcctgggcaacagagcaagactttgtctcaaaaaaaataaataaataaataaataaataagtaaaaaagagttacaagatgacagggacaaccttgtcatcatttacagatgatacctcaaaaacttagagaatcaactaaagatatattagaacaataacaattcagcaatgtggctggatacaaaataaatatacccaaatcaatagtatttttgtgagccaagaaaaacaatcaattacaaaatatatttgaaaaaagatacccttggccaggcatggtggctcacacctgtaatcccagcactttgggaggccaaggcaggcagatcgcctgaggtcaggagttcgagaccagtctggccaatatggcaaaaccctgcctctactaaaaatacaaaataattagctgggcacctataatcccagctactagggaggctgaggtacaagaatcacttgaacccaggaggtggtggttgtagcgagctgagctcatgcttctgcactccagcctgggtgtcagagtgagactctgtctcaaaaaaaaaaaaaaaaaaaaaaaaaaggaaaaagaaaagaaaacagatattcttaataataataagtgtaaaatatctagaaattaatgtaataagaaatctgcaggacttatatgaagaaaaaattaaaacctaacaagggacatactaaaggcctgaattaatgcaaaaatatctcatgtttctgaataggaaaatttagtaatattattcccatattaatatggaatttcaataaaaatatcaagcaggaatttgttttaggatctgaaaaaattattttaaattttatttggaaatatcagataagaatagctttttaatctgctgttataatttgtgtttttgttgcacacgtgtatgtgcatgtgtgtgtatgtctgtgtgtgtgttctgtgtctgtgatgcaatatttgccgcataaaagttttaacagttatacacagtagattttgatttttattaatataagcactctgtttcaggtaatgacttttcctaagaattacatctggtttcataaggtgttttgtttgttttactttgtgtttgctcaattatgtatgattttccttttctttctataatttgtcttgatttgtttttgctgtatcacttgaaagcagcatatatagtaagatttactttttgaacccaatgtaagaggtttcttttaaaggaggaatttaaaccatttggttttacagccataaatgatgtgtttgatctcttctcattttatttattctactttctttagtgttttctttgtttttctatatagactgttttcaaaaatccaatttgaatatatacttaaacctgtagttctctaattatgcaaattaattaaaaaaggaatcctttaatgtccccattacataaaaaagagtcaagttaaattttatttctcctacactgacctcatccttccagtgtttgttaattcaatttgatgctatagattaaaaatacattatattatctgatatcaatttaatattatatgcttcttattttttgttttaaattaaaatgtgaagatattaagtacaactcattgtttttcaaggatgcttttagccttttgcattaaattggtcattacatgaaattaggcatttcctgctctattatattgagttctttattttgagtttttattcacttagctggaatgtatacttggaatagatttttatgagaatgttatacacgtgcagtgttttatgaggcttcacattgcttaaaatgtttcttttgccttttttaaatgaacaataatttgtcagggaatacaaggattttatcataaacttttgctaccaaacttagatggttcataggctaatggtgtttaatattgtgaaagagaggcttagggctaatttgatatctattactttgtagttaacctgattttccgtctggttagtgctatgagtttgggaaaataatggaaattacttttttaggcatagatatagggtttgttttcagttattttgcttagtactcactgtagttttgctcctgggagcaggtttttgtccacatgtgaatatttatctttactatttttatttttggttctgttccttactattgaatttcttcctacttagtttggatctctgtgctgtatgttccctctctatcaccttttccttatttatttttgtatccgtcttttgaaattgcatctggttgtgatcatgtttgtctttcacagcataggtattattttccacaagtcgattgtgttctgtattgcctccagctttcctcttgcatcttaggcttccttgtattctttcttttcatttgtgtcctcatttcaatcttttcttctcttttggctattgcctcttgtcttaaggaggccatcttctcttagagttcttttggtttggaaacactattaaaaatgcatactaaaatttttatatattacgttttgcatgttttcttctgagttgtcaagatacaatacaaaataaggaaaatcaatcatttcccagtgtcacacaggcttattgttgtgtttctgtgtatgcattctcaaaaagaggtaattaactagtcttgggatttgccaaaaggcaggatgtaagttgccagcctgggtggcagccttttggtgggtgacttgagcaaactctaatgttaatcttcatgtgtttgaattctgtgtagaatgtactaaatttctctgtgactcagttttcctatctgtaaaatgggaataatgattttaccaatttcatagggttgttgtgtggattaaacaaactgatatatgaaaaaaaagacgcaaaagcagtatcctcctaagtggagaagtaagttactgtactaatgcatgcataaaacaaaaatatggtcctaaaattatttttagattttaaaacttaatgtaggctcattaaaaaaattgaatattacaagaacagtaaatagagagtaaaaagaacatgtaaaatcttcactcagaggaattatcagaggaatccctgataatattttggcatatttctctccagtatttctgtttattagaaaattatattaaaaagaatgtacttgtatggaaccctggacattttggcaataaaactctaaagacgctaaatatataaaaatacgtcaagatctatcatagcagctaccactgtattctgtttgcaatagacatgaagaaaaagtttgttgatatgggggataaatggagcatattatactattccaagacctttttatgttaatcattattttcctttttatgtaggagacaacattttcattttgggctcttcttttgtaagaaagttcttacaaaagaagattctttgcttaattaatttaacctttctgaaatataggtttctaaagagccaaaacaagcaggacggacctatgaaataagtgcgtaattcattattactgggtttcttcaaagcataatgttaaatctggttcagcttggtgtggctctactttttatcttctgcaacatgcaaattgattaaaattaaggtctactcttctcttggcaggaatttttatttagctatcttctcctgtattcaccatgaaggtgtaatctgaaaactcaactatatttccaaagttgaaatgtaaaggaaatgtaaaagaagattctcatccaattaataagattaagctatttaatattaaatgatttattactaaataaaaacatttatttttgttattcatttaatattaaattaaatgattttaaacaagctcttgattaaaacaatattaatttcatttctttttttttttttttgtctgttttttgagacaaggtgtcactctgggccagggctgaatgcagtggcacaatcttagttcactgcaacctcaaattcctgggatcaagcaatcctcccacctcagccttctaagtagctgggactgcaagtccacaccaccactccgggctaattgttttattttttgagagacagaccctccctatgttgcccaggttggtctcaaactcctggcctcaaaggatcctcccacctcagcctcccaaactgttgggattacagggatgagccactatgacagggcttattttcttggttcacgttaaaaaacaaagtattttcattgtttagcgtaaaggcattttgtttttacttttgttttttaaaattaggtgtagaggtaaaattcacttgatgtatattgcgatgaaactacttgaaacagtattgcaaaactcaagtttcttgagggatagctatatgctaaataccgtatttggtgttttgcatattatttagttgacaagatcaaacaacgtaaggcggtatttcatgtcactagtttttaaactttagcgtgcatagccttacctggggagcttgtgaaattacagggaggtgggctctatctacctctagagattctgaatcagtaggtctgggatgggtccccaaaatttgcattttaacaaaatgatgctgctgctgctgctgctttcaggatcacatttttagaatcactgtgatgagccacacaggagtggtaaggacagcaaattgcagggtgttcgggggaggaatgctgcaaaccactcttggttagaatgtatgtgaaaggcttctggggcgaggtaggattccagcaagaccttgatgggcaattaacatagagtagagaagaggggatggaggagagaacaaccagagagggaattgtgtaagcagtgatatggaggtaagaatgtaaaatgcttgtttgagggatggcaagaccatctgaaaggaagaagtgattcttgctgtattagggaataagattgaacaggctaataggggctggatttttgaagatgtttaatatctggttgaagagttgtactgtactttgcctaggcaaggaactggaggtggggtaatctaagaatttcaaaggggaaaatgtacctagtagaaaacatatttaaaaggaaaatagaaatagccaaaatcaggccctagctagtattcttttgctctctctcccttcttctctcttaacttctgaaggttatgtggagccaataaatattatttattagatgagtgacatgggcacaatagtgttttagaaaattaagctggtggcattgtagaatgaattgtagagggcagagggagactctagtagatatcctaggcttgaagaggtgaaagttcttatttggggatcatgatacccttaaaataagtagggcagttaaaataacgcagcttgctttgtggagggatggttaagatggagtgtttggttttggcttggtgaacttcgtagggcaggatgacttctaactggaatgtgtagctcgtggttgtggatctaaagctggagcttgggagacaggtggaaactaaatataggaatacagtacttgatggaatgataaattcattcatttgttcaattaacaatgtctcagtcactgaactgggtgctagagaccctataaacagtcataaagactatgagtgtaaggtcttggcagtgtagcttcagggggacaagggacagaattcagaggatgctgtgtttgagagaagagaagaaaaaggaggagacaatgaaagagaaagaggaggctatggaaggaatgatcacagccatcacatgtaaatcaggatgttagatctcccaccatggagagaatttgaggaaggaggtaataatgggcagtgccaaatgctgcagcacagaattgcagctactggcctggatgactagagtatgctggttgccctgcgggagtgctctttggaagcagagttatctgtagtggaatggggtgggggtgggggcggagcccttgagaaagtgaagaccctggattcagagcaattgttcaagaaatttagtgtcgagcattaagagagattaggacagcagaaagctaacatgctttcttttcttaaagtgaggaagacctttggtcggttgaccacagggggcaggaagcagtggtgggggagagataaagctatgaccctgcagtcttgcttatctcaatacagagctgctccatttttctggtttctgggggcctagtccttgggagtaactttgactcctctctttctctgcactgatcattagatccatcagaaaacctttttggtattttatcttcttgaaaaatatagccataatccaactacttctcacatctatgcaactatcaactttctcctgaattattgaaagtctccgaactcatctcccttctccttccttgaccttgagtctgttctcatccagtgtctaaagtgatcctaataaagcttaagttggataatgccactgcacaaaatccaccagggtccccctctcttttattattcactagagtaagtattgaattccttgcagtaacctacaaggccctgccaaacctgacctgctcccccagcccccagcaccaaacacacaccctcctcattcctcaagctcaagccctccaggagactgcagcgtcctctcacgtaggagtgctcttctccaaatacctgcttggtctttctcctcttttgggtctttgttcacatgtcatcttttaagtgagacctcccaggacactcttttataagttgtaactccatggcgcttatcacctgacttaagtattttattcctgtccctgcccactaggctgtaaacttcacaagggtgagccatctttcccttgattttgttcgttgttatagtaccagtggctaaaacgccttttagaaaggtagcactaagtgaatttttaactaatgcgagagaaagcaggcatagccattgagggagacaaggcttagagggtaataataatagcacttttgttatgcaccctgctctgtggcaggtgctttaatatgttgttgtatttaaatcttataactgccttgcacggtgggcattatactccattttacagctgaggaaactgagcattgggcacatggttaataagcgtataagctagtagattacagaggcaatctaatatgcctaagaaaaggggatcaaaggcagaggatttaatcttagaagttaggaaggatttttctcaaataggaagaaaggaagagaagaaacataagagctgagatggaaaggagaatgtgcgaggaaatcttttttctgatgaccttgatttttcttagtaaagaaggaagccagcttttctgctgagatggagaggagctgactggggatttcaggagggcaggaaaggtatgaagtagacctatctgggcagtctgatgaagatatagattaacagtgggattcctgagatgtgtttacggcccagctagaataatacatcaactaacaaaaggatgttagcaatagatggtgtctttgtgatcaattaatccagctcccaaattttatgctttatcattctgtatccctttcgtctgtgatctaccaagaccctgggcacttccacttatcttggacgatcttacatctgttttccatttgctcattggtttgtttatgatcattttttagtggtatttgtccaggtaggcagccattcaacacctgaatctcgctcttcattgacctctccaactccagcgaccttaacctctcctttcctctgtcacctttgcctaaggctggacttcaggagactgtggccttaccgggaaagtaaagacgggttgacagtggcagagtgtggtgagaaggggctaaaggacaggtgcccaggagtggagaagccctggagactctggagaggatggggctccagttcaaaaaggagggaggttgaagcaaggtagacctgaataaaactcattcctgtttaaaataattttgtatacattccaagatgattttatatatatatatttattatactttaagttctagggtacatgtgcacaacgtgcaggtttgttacatatgtatacatgtgccatgttggtgtgctgcacccattaactcgtcatttacattaggtatatctcctaatgctatccctcccccctccccccaccccacaacaggccccagtgtgtgatgttccccttcctgtgtccgagtgttctcattgttcaattcccacctatgagtgagaacatgcggtgtttggttttttgtccttgcgatagtttgctgagaatgatggtgtccagcttcatccatgtccctgcaaaggacatgaactcatcattttttatggctgcattgtattccatggtgtatatgtgccacattttcttaatccagtctatcattgttggacatttgggttggttccaagtctttgctattgtgagtagtgctgcagtaaacatatgtgtgcatgtgtctttatagcagcatgatttatattcctttgggtatatacccagtaatgggatggctgggtcaaacggtatttctcattctaggtccctgagaaatcgccacactgacgtccacaatggttgaactagtttacagtcccaccaacagtgtaaaagtgttcctatttctccacatgctctccagcgctgtccaagattattttgatgtttaaaaagaatgcatttttacatgcatggtgctgtcatttcttcctttttttttttttttttgacagagtctcactctgtcacccaggctgtagtacagtggcgtgatctcccctcactgcaatttctacttcccgggttcaagggattctcctgcctcagtctcccgaatagctggaattacaggtgtctgccaccatgcctggctaacttttctgtatttttagtaggaacagggtttcaccatgttggccaggctggttttgaacccctgacctcaagtgatccaccctcctcagcctcccaaagtgctgggattacaggcgtgagccaccatgcccagctcttccctttttttggacaaatagaatccacattgttcatagtaaaatatttttaaaatgtggaggaaaaaattattgtggggatatttgcttcacagagttaaacgtaaatactctgcaggaatgggtaataaatatagcatggtaaataaatctgtagatagtctatctaattatgtatacttttctgtatatttagccataggggtgttaaaaagttggcatttgtgttgctgtgaactaatgttactatttataacattactaatgtttagctgagaagaattgttagtttgtacaccagtctttcagtatttggcagctggcttaaattgtggcttttgatatttggacatgtatattaaaaacaagtattaatttcatttctttgctccaaaacacgcaaattaatcatgcataaattgaatgggagtgcatataaatgcaacataccagtttatgcgaactcagaattttaatgtaaagagttcggttttaaatgatttgggtgattgtagtcattccctctatttagtaacatgtgcccagttttttttttttattatgctttaagttttagggtacatgtgcacaacgtgcaggtttgttacatatatatacatgtgccatgttggtgtgctgcacccattaacttgtcatttaacattaggtgtatctcctaatgctatccctcccccctccccccaccccacaacagtccccagtgtgtgatgttccccttcctgtgtccatgtgttctcattgttcaattcccacctatgagtgataacatgcggtgtttggttttttgtccttgcgatagtttgctgagaatgatggtttccagcttcatccatgttcctacaaaggacatgaactcatcattttttatggctgcattgtattccatggtgtatatgtgcaacattttctcaatccagtctatcactgttggacatttgggttcattccaagcctttgctattgtgaatagtgccgcaataaacatccgtgtgcatgtgtctttataacagcatgttttatactcctttgggtatatacccagtaatgggatggctgggtcaaatggtatttctagttctagatccctgaggaattgccacaccgacttccaccatggttgaactagtttatagtcccaccaacagtgtaaaagtgttcctatttctccacatcctctccagcacctgttgtttcctgactttttaatgatcgcctttctaactggtgtcagatggtatctcattttggttttgatttgcatttctctgatggcaagtgatgatgagcattttttcatgtgtcttttggctgcataaatgtcttcttttgagaagtttctgttcatatccttcacccacttgttgatggggttgtttgttttttcttgtaaatttgtttgagttcattatagattctggatattagccctttgtcagatgagtagattgcaaaaattttctcccattctataggttgcctgttcactctgatggtagtttcttttgctgtgcagaagctctttagtttaattagatcccatttgtcaattttggcttttgttgccattgctttgggtgttttagacatgaagtccttgtccatgcctatgtcctgaatggtattgcctaggttttattctagggtttttatggttttcggtctaacatttaagtctttaatccatcttgaattaatttttgtataaggtgtaaggaaggggtccagtttcagctttctacatatggttagccagttttcccagcgccatttattaaatagggaatcctttccccatttcttgtttttgtcaggtttgtcaaagatcagatagtcatagatatgtggcattatttctgagggctctgttctgttccattggtctgtatctctgtttcggtaccagtaccatgctgttttggttactgtagccttatagtatagtttgaagtcaggtagtgtgatgcctccagctttgttcttttggcttagggttgacttggcaatgcgggctcttttttggttccatgtgaactttaaagtagttttttccaattctgtgaagaaagtcattggtagcttgatggggatggcattgaatctataaattaccttgggcagtatggccattttcacgatattgattcttcctacccatgagcatgaaatgttcttccatttgtttgtatcctcttttatttcattgagcagtggtttgtagttctccttgaagaggtccttcacatcccttgtaagttggattcctaggtattttattctctttgaagcaattgtgaatgggagttcactcatgatttggctctctgtttgtccgttattggtgtataagaatgcttgtgattttgcacattgattttgtaccctgagactttgctgaagttgcttatcagcttaaggagattttggtgcccagatttatatagctatgcaataaatacctatgcacatgttgacacaatgtcacgtattgactcatttgcacattgtctaaaatacctgtaattttagccatggaaggtagttaaaaaaagggaaagttcaacctgggcttaaaatggcaattagaatcacatattttcactggagaagggatgcaacaggctgcatagttcagctttttcatttgtgcagatgaagatcccagggttctgaagatatccattgttcaaagccaccgggctaggaagtgttagagcactaatgagaactcactaatgagaactcctttgtatcaatgaagagaatgtttggttgattgaaaaatttgtttttaacacagttttattggactatgagctcttcaagggtcaaggctaacttagggtcccatggtattcatctttgtatctcagtgcatagcacagtttccagtacatagtaggtatttgctgaatgcatgatttccaaaagtaagtttattttttccattttgataatatttaaaaaatacattaacaaaacaaaaaaggcattttgagaaagtagagtttaaaaaataaaattaataaattgagttaaaactgaagctagtgaattggttttcttgaccatataaatattgtctttatgtttacagttggacttactaattcccagaaataaatggccatttgtaaacagtgtgtttggtttgaattcatatgtataaacatgtggtgtgtgtaagtatgtgtaagggagtttatattttatttatgtatgtcttttactactttattaatatatattatattttacttaacatttccagagagtgcattaaaattaatgtttcctgagacttaatctttcctgagaaaggatctatccaatggtttagtcaaactgactttacaggatgttctgtaattggtggacacattgctagttccttctgtattaatcatgttatttaattcagtgtcacaataatattatttgttgtctttatttacagacaaagcacagaaaagttaagtctcatttacacaactggtcgggcgtggtaggtcacacctgtaatctcagcaatttgggaggccaaggcgggcagatcacgaggccaggagtttgagaccagcctggccaacatggtgaaaccccgtctctactaaaaatacaaaaattatccaggcttgatgtcacgcacctgtagtcccagctactcgggaggctgaggcaggataattgcttgaacctaggaggcggaggttgcagtgagctgagattgcgccattgtagtccagcctgggtgacagagccagacttcatctcaaaaaaaaaaaaaaaaaaaaaaaaattacacaactaatcaggagcagagctaggtcttcttattcaatgtctctgctttttatccagcaaaccagcctggctccgaggttagcatcttcatatgttatcttatggttggagtacagctggaggtgagaatgaacaaatttcaggaatatatatttttaaatagctgagaactacagtgtacaaccacaggcacccacacccaaaagggctggtggtaccatgacttcagaaggaaagtatgtatccaagttggatcacagctcccttatacacaggcccatgaaggggctatggaaagaggggcgtgaattctagaggataagctggtagactctttcccaagaggactcatttcagatgggtgaatttatcacaatgggtcagttctgccagtcaggctcagggacctcactttgtattttctggggtatgtgcatgtgtgtgtgtgtctgcagggagtggaaggcagtttctacatcttgtttagaacattgtgccagtttattaaattacagtgagaactagaactatcaaaggcacttagtttatgtagaactaatatgcattttttggtctaggtgatagagagacttagtttactgtctaacctggtctttcatatcttagtgatggaagcagtacaaaagggtaggatttgtactgtagtcccccttatctgtgggttcattttccacagtttcagttactcacagtcaaccacgatctgaaaatattaaatggaaaattccataaataaacagttcataagttttaaattgtccatcgttctgagtagcatgatgaaatctcaagctgtcccactctgtctgcccaggacgtgaatcaggcccttgtctagtgtatccacacaatagatgctgccctccctttagtctacttagtagctctcttggttgtcagaccagattgactgttgcagtcttgcagtgcttgcgttcgagtaacccttattttatttaataatggccccaaagtgcaagagtagtgatgctggcagattgttataattgttctattttattattagttattgctactaatctcacattgtgcttaatttataagttaaactttaccataggtatgtagtataggaaaaaaattgtgtatatagggttcagtagtattcttggtttcaggcatccacatattctctacagataaaggaggagtcttgcactcatagctattctgtggtatagctgggaatagaactctcatgtcctcagcatttggcccagagttctttccactggttttggattggaactgggcctcagaagtgctggagaggtgggcctaccttgagtgtaaaaaaactcctttttactgcttgccttcatgtactgagcagttttattgtttattcacatggagagttggaatagtggtaacattaaagtaaacataaacttaaaaatcagtttaggactagatgcttgaatacaaactcctataggcagggaccaactctgtttcttctgcatatcccaaaaggctccagaggcccagggacagttgggcctgtcttaccaacacttaatgaaacatcggttgaaataaaaaccctcataagtcaggcatggctaagtcgatcagtcagcaaatattgactgtcagctccgggcatgaaatagtttgatcacttggacactggtatctcccttgactaaagatgctaaaaagccatcttggttttagtgacatgcctcttctcgagtcacaaacatgttcatagaacagcaagcttataggtaagtggcactgactctgttgttggatattgaaaaatgagtgcttccacttctgcagtagccactaaaaacttgtggtcaaattcagtgcctgagctttgaaatcaattcagttcaaaaaacagatgggctattcttctgatgaaatgctaataatattcaacaatgaccattagttattaagtgcttaggatacttgtcgggcactgtgcattacctcgtttcattttcacaccaactgagaacaattgccatgctctccccacgtcacagagtaaaggaactggaggttcagagactggcccaaggttacacagctaatgagtgggagcactgggatctgagcccaggacttccttcaaaagctctttgttttttcatccttaggcaatcatcttgagccttgtctatttgtttattattttttaaacagttttcttgtgatggagaatacaattcacccatttgaagtattcaattcaatggatttttgtatattcacagagctgtgcaaccatcagtacagtcaattttagaacatttttgtcacctccaaaagaaacatcattccacatttccttcaactctatccccatcccagccctaaacaatcactaatctactttctgtctttacggattttcccattatggacatttactctaagtagatttatacaatatgtggtgctttgtgactggcttctttcacataccataatgttttcaggttttgtccacgttgttacatgttataaaatgaatgtttgtatcccctgtaaattcatatgttgaagccctaaccttcagtgtgactgtatttggagacgggccctttgaagaagtgataatggttaaatagaatcaaaagcttgggccctaatctggtaggattaatatacttataagaagagacaccaaagagcttgctctctctctgccatatggggacacagtggaaaggtgaccatttgcaagccagaaagagaaccctcaccagaaactgaccctgctggacctcaatctgggatttctagctggaccacgatctgagattactgtaagacagtaaagttctgtagtttaagccacccagtctgtggtattttgttatggtaactctagcagactaatacctaccaggtattagtagtttattattttttatggctgaataatataccattgtatggatataccaatcttgtttatctattcatcaactgatggacatttggctatgatctcccatcccctcattctccctacgccaccctaaagcaaccactaatctactttctgtccctgtagatttctctgttctggaaatttcatacaagtgaaatcatataatcttgtgactgacttttttcatttagattgttttcaaggttcatccttgtagtagcatgtatgagtatttcactccttttaatgaccaaataatatttcactgtgtggagactgtaaatgttgtttatctattcatcagttgatggacatttgggttgtttctacctttgggctattatgaataatgctgctatgaacatctgtgtacaactttttatgtgtacatacattttcatttctcaggagtagaattgctgggtcatacggtttggcccacgttttagtctctaaggttttgtaagtccttatggaagttgccagggtactcaaaatacgtagaggtagcagaatacagaagaattaccaaagggtttatgccgtatttttgaaatttgataattatgtttcccctttctgctccacataggaacactcgatggaattatagaatcttagaactggaaggcaagtgagaggtgacctagtctcactgtttaattttaaagatgaggaaatcaaagttcagagactgactcacttcccaggattgtacagctgggtcatggctggacccagaccacacatgtaatctctttttctctcaggcagtattttccactggggtaacctctcagagagggagcagttcttcggaatgaggctcagttgctgaaataaagatgcttcgtatattgtttcccactggctgaagtctatctggagttcaaaactaggtcatggtaattctttgggaaatgccatgcagccttagagaaagcttgtctttcaaagccctttgattataggaaggggtgaagtcccagtgaggtggtgggcttggggattgtcacaaaagggtgctagtaagtattaaagaaacatacttattgaagttcagtgagcaatctgatttcagcaaagtagaatgtgactgtctcagagcctgatgatccaggaggcttacagatgtcaagattcacaaatagaaatggaaatttaaaaagctaggcatgagatgagaagtcaaaagttaaatgatttttaacttttttttataactataagttataatacctttcacaatacgagaatcaattcaataagttctaaagaaataagtaactataaaagttctcattgaagagggttagtgaagatgcatttagtatgaatggggagaggtgtataaatcatgatactgggatgacttcccaagttacttggtgaaacaagcctttgttagcagagatagataagagtattcaaaacagcttactaaatgctcttaatggcatctcagtttcaaataagatatgctactaatttattgagtcacttattgaatattttatacattgaaagaacatcttgatttcataatttcttcaaaacatattttgagatgcaaagagtagttttattgttaaacatttcatgaaatatataaaattattggcaactgaatgcaagttccaaaatctgaaagatgtacagtgcctcagtacattttgtagcacagagacattcagggtcatttaaaaattgaagcaaataaatagtcattatgtggtctaaattaaagtacagtaatttcgaaaattcaacaacccatttatgagctatgtactctatgtaagccattgtttgcttcttagaaatgcaaagattaaccaggtatcatttctactgccagggaatttacaatttagtggctgaagcagcatttaataagaactttattggcaagagaaagaaagagagagaataatagaagcgtaaaggacaggcctaggaaatatagttttcataatcatcttgtaaataaggatttataaagcctgtctcctccaattagtattaaagatgccctgtggaggctaagccctgctgaattcaggatatagatattactgtgatgagatgtatgtgattggagaaggacatgatatatatggaaaatgcttaatgattacttgcaggggtgaatagtgataaattggacattggctttaaatattgtagagtaaatggatgtagctgatgaagcttttgtaaactatgccatccatattcagctttctctagtttttcgattttctagcttccccctgcaatccaggatccaactgagtctttttttcttaatctagtagagcctctacatcttatttgttcttcccgatactaacatttttgaagagacctgtccagttgtctcgtagaatgccctacattccggatatgtgatgatttcctcatgattacattcagattacatatttttagcaagaacatttcatggctgatgatgagtagctctaattgtatcagattaggggcacatgatgtcaggttgttattccctcagttgccaatttactgtcatatctgcaaaaatccaggaaataacttggaccttcttctcaaaaagatagcctaggacatttatctgtcagtttttgcttactctgaggcatgcgatgaaattgccttaggcaacgagagacctcttgcctggggggtagaaggggaatgttggtcattaattttttctttctttctttttctttttcttcctttctttctttttctttcttttttttttttttttttttttttgagacagtctcgctctgtcacccaggctggagtgcagtggtgtgatctcagctaaacctctgcctcccaggttcaagtgattctcctgcctcagcttcccgagtagctgggattacaggcatgagccaccacgcctggctaatttttgtatttttagtagagacagggtttcaccatgttggccaggctgatttcaaactcctgacctcaggtgatctgcccgcctctacatcccaaagtgctgggattagaggcttgagtcatcgtgcccagctaatttttttttaatcaactgattggcattaggtccagtgatgtaactattgtaacagttgttggagtcatggctgttccaatcctaggggttctgtacacttgttctttgtcccatccatgcactaattttttttgtgcatttatcttagttgtgagatttgtttttgttcttttggcttcatgtataagaatcttttcaaattggaagaggtagagattttaaacagggaaatttataggctgcattcctttatgcaataggtacttattgggagcttcctattgtcagtcaccttttcaagtgctgatgatacagtggtgagcaatacaaagccctgccctcctagatcttacattccagtgctgaagaccagttataaatagatgaaacatttgtaaaatgtctagtagtggttaagtgctatgatgaaacagtagggaaagtggttgcagagtgcgtctggggttgttaataagattagatggtttgaggacctctctgaggaggtgatatttgtgcagaaatgtgaataaggaaagggagcaggccatgcactgagaaccacccatgaataggtactgagatggtacatactctgtatgtctgagaaagagccaggcagcgggttgggcaactggagggcagtaaggaagggggagcctggtagaaaactggtggaaaactggaccaaggaagactgtccaagtacagtagaggctgagtctggtatcaaggaatcccagcaggctgatgctgtgtactcctactctacttctaggaaaacaggctcgaaagactgaaaatggctagtttaaaaacagagtttcaactgaggtcttccacttagtctcaggtagtatagaactgcattaaataccatttgacagatttgctttgcattatatctccaaggtgatactatagatactttaaccaaaacacaaattagcagtgggttacacactttccagctgggtatctctttgtaaagatatgcgaatagttttaaatcctgtggtgccataaaatgaacactgaagtaggagttggaagatctgaatcaatgaactggcctgtgggaaagctcttgaaccttctccagcctgagcagtcccacttagcacactgagataaaccccctggttatctgattggggctgctggaagcatgcgatgaaggatgtgtatgaacgtgctttataaactatgatgcatccagcaggtctaaggtattattatcatttagacctttgttatagttttgctaaacagatgcagtctattatctagctctcatttggaaggggaatgacaaatagttacttcaaggtacaatgcttcttaaagagcagaatctgatcaatgcacctgaaagaacctcatgaattactcagctattcttcaaaccagcatatctgaactaagggaatgatcacttttcattcccatttaaagctcctggaaatcagcatgctctgtgtgagaccctatctggggaatcttgagtttcgatgctggcttaataaagtagaaacagctttgtgcttcttggagaagtggaaatttgagaaggattggtacgtctaagttaggcaattggtaaagattcatcgagtctctaacataaatgggtggatggatggatagatggataggtagatagattattaatagatagctggtgctgtgggggattaaaaacgtgtgagaaatgggtagtgataataattatagctgacattattgagcacttatatattaccaggcatgaatccccccttcaaacaatgtgagataactacaattataatcccatttgacagagaaggaactacgatttggagaagttaagtagcttcctccaggtcatacagctagaatatggcaaggctgggatttgacttcagatctgcctgactgcgaacctgtactcttaaccatgtgctctctcaagttgcatatagtatccttgaggagggaggatttttctctaaggaaagttacatagtagtaaattatgtagaaatgaaactgaaaagtctgcacaggtaggaattcagtagaaaaacaaaatggattaatgggggccaaattggtcatgggaggtctgctggaagaggaggtcctttagcagggtcttaacagactggtaggacttgaactggaggaaatgagccagtgggtgatgctgagaggatccggccagtgcaaagatgcagaggtgggaatgagcaagatgtttatgttcagggacaagcaggcagagaggccttgtcctttatagaagagttcctgatgaggcatggggtgggatatgtgtgtgtgatagcattagaatggaaattactgtgaaaggtagaggaaggtaggccaaagagactggattttatcctattagcataaaaaatcctcagatggctctgaaaccagctagttatttaatcagagccgtgtctgaaggacttaatttggaatcagatttaaggacccattagagttgcaaaagattgaatgtaagtaaaaatatgtatgcgcatatgatattatcatgtatttgtgtatctctagttaaaaataaaaggaaaatgcacattgtttccctgagttatgaatactgcatatgcaaaatctcccagaattatgcccattccgtgtttaaaaagaggagttgaggctctggagaggaaattctcgccaaggtatagtttgcctgcttggcagaaaatgaggtgtgcatgttcctgatgcttccaggtttccttcccattcttgtgtttcatttttgctagcttggctgtgttccctctggtctgcataacaaaaaaatagttaccattgattgaaaacctacattctgagagttcacagcaaccaattataagaattagatggtattatccctattttgctggcaaggaaactgaagctcagaaagtttagaaactaaagtcacatatctagcacagtaattggcagagttagacttagatatcagtcttgtttagtcagaaaagccctgctccttcttctatactttgtgtggtggttaggagtataaacttgggtgttagctcttgctttctaagtgctcttgggcaggttattaaagttatttgtgtctcattttcctcatctgtaaaatgctgatagtcgcagtactcacctggcacattataagggctcaattaatctcttttatgatttttaaaaatgattgctttctatcaccaagttgttctgttggctgtaacattctggacctcagaaaaagacttaaattttggcacaaggaaaggaggaacatctttgaaaattcatttcagtttgtgcacattaatttgaaaactctaattagctatctattttttccctggggttttcttaacccagtttccacgttgctgctgctcacctcttcctctctgtgtacctgtcaacagtgatcacacactgctgctctggggtggaccctgtctgcctaatgttggttaagcaagaaagaacttgatgtctgcctgtcattcctgccttctcttgaacagggacgaactgcctcttctccaagagaaagggttattagactggccataccttgtttttggactttgcagagcaaggacaactcaagtaggatggtttgaagtttctcaagaagcccctcagcaggcttgaagacctgctataagagcaggcacccaaggcaaaaaagccaccaagcagtcatcaggaatgggtaaagaaaggattcagacagaaccagttcctacagggcttggtcaccgtctaaaatggaaaacttctcgccccatcctttgtgtgttcttctagggcctagaacaccagagatattcattaacaagttgctggcggggatcagcttcggtgtaatttctaagtggggctttccgggagctatgtcttccttgcctgactttaatgagcagttttatatgcagatatattctttggtactagtagtattgatttctcatcctgatttaaaataacctgaagttttcctgctcatctgaatgaatattcacaacaggaattaaatctgtatgtccaggactgcataattatctattcatttccgcttggaagaccagtataaaaaggtgagccatgaagtctttcggtgaccaaaatttggaattaaacctgttgcacctccatgaaaatattaatagcttttttttttacccagatgacattataaaatacatgcaataaatttatatatttgatgattgccagtgatcaaaggcaactcttttttaattttttctaataaattccccaaacttggaagatagcagtgaaatgaaaacacactaaataattaactagcacagttgaccagcaccactttcaatctcccaacattaagattatgatttctcagccagcctggtcaacagagcaagaccttatctttacaaaaaaattaaaaaatgaaaaattagccaggcatgatggtatatgcctgtagtcccagctccttgagaggctaaggtgggaggattgcttgacctcaggcattcgaggctgcaatgagctatatcatgccactgcactccagcctgggtgacacagcgtgaggccctgtctctaaaaaaaaaaaaaaaaagattattgatgttttacaggagtggacatctacatgtgcacaaatctgatccactggggctcattctgccattagccctgtttgtgatgcagaccatgcaaggcaatctgagtgtagtggattaatggtggcttccaattcaattctcctgttgagaagtggggtctatacctccttccccttgcatctgagtgggtttgatgactgatttgacatataaaatatggcagaaatgagtctctaccaattttccaggcaaagtctttttttttttttttttttttttttgagatggagtcttgctctgtcgcccaggctggagtgcagtggcgcgatctcgactcactgcaagctccacctcccgggttcatgccattctcctgcctcagcctcccgagtagctgggactacaggctcctgccaccacgcctggccaattttttgtatttttagtagagacggggtttcaccgtgttagccaggatggtctcgatctcctgaccttgtgatccgcccgcctccgcctcccaaagtgctgggattacaggcgtgagccaatgcgcccagcccaggcaaagtcttaaagagactgcagccttcattcatatcctgagaaaccagctgccatgcaaggagctgattactctgagacctccatgctgtgaggaagctgaagatactcatccagaaaggctgtatggagagaggtgtcagccagccttctcaggaaggtgccagacatgtgagtgaaaaagccttcagatcattccagcttcagctgcaaagtaaaagctactagaaccatgaaagataataaaattactacttaaagccactaagttttagggtggtttgttttctagcatagcaaaccagaagatgcttttgagtactgagaattgtgtatttctctttttacagataggtgctgggacctctgtagtttgatgttatcaaagttcttttaggattggcagagggccaaagaaccctgtataaattgctgcttctcttctgaattctaatttttatttaactttgccttgcttgtttgtacaaaattgtggtgaatataaatttccctttctctggcataatatacatgcaaagcaagtgttgcataggccagaagaaacactgggataggtaggaaaagcctacaaattggcagaaaagacactaaaaatgattagaaattaagaatagtatggtaacccataatatactgcttgcactaaagatggagagagacagagagaaaatttagtcttgattatttaacatttggcatcctagatgaaatgacaattgaaaatgattagatgcacaggattctctgacacccatgtgatgtatgtggtgtctggggaggacgggaatgaggtttcattccaggctttgtttctgcccaaactcatcatctcaacaatacaggtaatgggggttatagaggccttgttttggtctgtttattttgaacaatttaaagttggaattcagagtttacatagttgggagttgaagaccatatacccctgtagtgtacccatggccattctaaaaatcaataaattagtcaatagaaacacatatcagctagagtaatattcatttttcaggtttggttttctgcttatctttttattagtggtcagtggtagactgaggtcacgttgttcctacagatggtgtaaatatcgtttatcaaataccttccatgtgccggacactttgctgggtgttgaagattgttaggcaagtttcaccccagagaaactcacagaacttttgttcttaacacttgtttttctttatcttactacctgttttccacatattcagctccttttggatctttgcaaggatatgcaaatatcaagttgcttgttgctaatatttgtctttagcatttccaattctggttttctcaaattttacccaagagtatgagcacagaaataaaagcattaattaaatgcacaaaatgaaaaagaaaataactataaaacatagttcatcccccctcagggacacttttatattagtgtccctgaagggggctgaactatgctttatagttagcagtatacaggtggggtagaaagaaactccctgagagatgctttttactcttattccctgatgtgcagttgcgagtgaggtgtaccgattggcactaataacaatatctcctaacatttgcatagcgatttaaagctttcgcatactttatcctttgtcagtttgcagttgaggcgcctgatatttagagacgcttagcttgccataccactggggttcagccagagggaaaataagaagaggtgaaagagggtggtttgtgttgtatgtctggtaggtatcaggccctttagcatggcacttcatttaatcatcacaacaacctactgaggtgggtagtcccataaacaagcttatctcaccattgagggaattgaggctcaggaggattaagtgacatggccgaggcagtcaatgatgccagatgctgaattggatccagatcggcctgctttctgatgtcttctgacctgcatagagaatcttggtcacctgaccctaagtaaaagtccttcatggcggaatgaatcggatagccctttcctccagccaccttcatttggcaagtctaggccctggctcctgttgcagcttcccttcatggctaaatgagccaccggtatctttcatttcctaaaagcttattaaataagatttgaaagtcagggcttccataaataaaagatccttttttgcaaaattttccagattgagcgggggaaaaaaaagccctaatgtggtattttatttgtctatgtggactttttttcttttcatttatttaataaagacatagaatctatacaaggtacagaacataaacattatgtgagagatgttatatttactttcatcaccttttttagaagaagctgccaccaaaatggttttttatggaaattatatcttgttatgagtcccattatactgtcttatgattcccattatactgtcttatgatttttttcttttatcttcagccatttatggacattattatctcagaatgtgtgcctcagatagatgtgtcattgtgggttatgaaagctgactcagaaccatgattgctgaagggattgaagacgggaagcagccacgaggcacctgaatgtctttttttctggactgttaaatgatacttctgattcttgaatgagcctgatgagatagatgggcgcctgttgaaactctgagattcttgtgtgtgtttcattcatagtggaagatgctgtcgtgtcacaaataaacttagggtggccttgcatgtagcaagaacttcaaaatacttgttagattaaatttaaacttttagatgtttctgttcctctggaaaatggagatataatttctgctgtccaactaaagtgtttgtctggtgctgatttgcagagggtaggtgttgtcttagtggcccctcctgtctgtctgccaacttagaacaggggctgggagagtatttatccctcagtctgtttaaagagctatgagcccagtgaaaacacatcattttaatagtggtaaccaactgtcctccaaccccattccaattaaaatgagaagaaatggaccaaagcaacaaggcaatttctattttacaaataaaacgtttctaaatttggagcggataactctggaaggttaatagaatcttaccatcactgaaggtcatctagatggatgtttgcattttctgtatgatgtttctaccaagattgtcatcatctcttgtgcccaccttccccttttccagcactgacctctgtcagaaggcctccccagttctcttctacttccttccgccatttctttagctcatcagctccttcgacttttccttctccactttcacccacataccagtggagaaccaccggaccccagtccccagctctcagtgtccttcaagctcctcttgaccattctctcccctgattactgctggaggggcttcttcctgtcccctctgcctctcctcactcccattcccccacttccccaggcaggcctgaggggccttctctgcccctattcttcccttctttcttcaaggtacagtctcacagagtctactgtgatctttgtcagcaaatcgctgtgttatcttagatgttcagtactgaatcagtgatttcaggaatatcacacttctgggtgcctctactggccatctgtaagatggggacacatcctctttctctgggcagttaattcttgggctctttactagaaagtctttcaaaactgtgtttgctgggtgggtgaggtggctcacgcctgtaatcccagcaacttgggaggcccaggtgggaagatcacctgaggccaggacttcacgtccagcctgggcaacagtgagatcctgtctctaccagaaaaataagagataataataactggtgtggtagtgcatgcctgtagtcctggctactcaggaggctgaggcaggaggatggcttgagcctgggagctcacggttacagtaagctataattgtgccactgtactccagtctgggtgacagtgtgaggccctgtcttaaaaaaaaataaataaataaaccccaaaccccaaatggtgtttgctctcaatatggagggtgccctgctgcatggcctccgagctctgggttcttctcaattcctgagtctgtaactctgttgatatgactaggtagctcctgcaatgtgccatggcatcagagttccatcatctagggaggcagtagagtggactagccacaggattccgagattacggaatgtgtgctggcaacagggaccaccactgaacccatggtaagtaggtgctctggttttttttttcacttctagctcttctttgatcattagatatctaattattaactcaacatgtgtttgtttttctggtgttatagatccatatatgcttacctacctatattgtaccattgatcatacattatcatagaatataggccacatggagttttacttatagctgtatctcctcccgccctttccatttttacctctgtagaggttgattcttctggggacttagacagatgatttctttgatagttcaggcttttccctaagttcttacttgccctcaacctggctacttttcagtatgcacatggtttttgaggtaagactgtgacccttttggtgtcttactaaattatttcatgactatgaatttttatattaaatagtgtttcttaccaagatatcatactcttacttctggagattaaacttggttgaaaatagaattttgggatgctctgtagaaattttagactagaaaattatcagtcttatgcattggctattggtcataagcatcataacctcctatgtggaatagaataattggagtcaacttcttatcacttttgaagttgaataaaatgaatctattttctccaggctgttgtttaactcggtgtgttgcctctgtatgatttttgttgtgatttttttttttttaccagatttggtgattgagagttgtcttgtttccacagaaatattattaatagaatagaaaattgatgatttattaaatgcccactacttaggcaattaaaatattatttagtttgatagagggacagttacttgcttgtttctatattttgaggtcatttttaccagttgatcaaaaacttacataggggttgctggttttctttacagagctaaagagacatttcattgtttatctaaacaatccacctgccagtttttctggggggtttatttcttagttaaatctactgggagttttccccgacttgagtttgactgcttgcgttcaaatccacactgttacttactagtgtgtggccttaagtaacacattgcttacccctttctctgcctacatttcctcatctgtaaaatggataatgattgtatctacctagaagaactattgggaagaccacacaagctaacctgtgtaaaaccctcagtcacctttattgattttcaaagtgtaccattttgaggaccattatagttgacctgtcagtttaaaaataagatgctgggtttcaaatttataatcatcgtgttaaagatttgaatcaagctgatgtgttataggcttggcatagagaaaatactgtctagagtaaacatcacagctgagtggagaaaccgccagactgacaaccagaagttctggtttctgctccaagttctgtcaattatgagcttggaaaaatcacttcactgctctgacctttagactccctatctgtgaaaatggggaaaatagtattttccttgctgagcttacatgactcttaagagaagtaattagcctttgtcaatgagagaatatataagaacttaaaaaaaattaaactgcatactctgcagttgtgaagcaggactttgactgaaggctggcagggattctagattcctcagattttctctagctcggttaaaaaaaaaaacaaactcaaggcacaaactatctttagtaacacccaagcatttggaagatcagattgttcatgatttcttaatgaatgtgttataaagattcattaaattaatgaactgataaaaattagtggcagtgatagggaaaaaaattgacaaatgttaatttttaatttttttacttattcctcacagtggttctcagttgggagtatgagcttctggaaatgtggaggagggaacattttttattgcctcagtgactgaggagtcacactgacatttggtggacagtggctagggatccttactcctcaaaacgcacaggggaatttgaggaagaactgcatggtcaaaattctcatagagcccccattaaaaacaacttgttaatacatctgatttctatacacttatatgggttatactgtaggtacatagccagtactattttttctagaaaacaagtggctgtacttcatgctttgataaattgaagatgcttctcccacttctcttatcttcactgattttattttcaaggctgtagccatatcctgtgacctctttgcctctaattctctatagatgtgtgcaatacagaaagccaagtgtgggtcagcagttgatgctgtcaaaagaacaagtaaagcctctggacactgttagcagaaaacaatcttagaactttatttttatttgattttgaacaggtagtactttcacatggtttagaaattaaaacaacatagaaagtgtactttaaaaaacctcactctattctagttctactgtctccattattctccatctcctgtaagttgctgtctttattagtttcttatgcttccattgtttccttgtgcaagcaaatggatctatttctattcacccccttttcttttcttttttttttttttttttttttgatacggagtctcactgtcgcccaggttggagtgcagtggcacgatcccggctcactgcaacctctgcttcccgggtttaagagattctcctgcctcagcctctggagtagctgggattacaggcgtgtgccaccacgcccaactaattttgtatatttagtagagacggggtttcaccatgttagccaggctgatctcgaacttctgatctcaggtaatctgcctgccttcgtctcccaaagtgctgggattacaggcgtgagccaccgtgcccggccattcacccccttttctaagacaaaagctcttgtttgcttggttttcagcgtactcatcactagtgtagttctacactcttccccaggtgtgggctgttctctttaacgtatttagccacagcagctattcatctgtttcatcttgttggggccatttcttctggagcctctgaccagccccaggctggactatctgtgccctaggcctgccatactgggatttcctttcaccgtcatccttttccctttttgtgctagctcccatttcctggatcctctttctttgtttactcccttattttcatggagcacatttttcagtagctttcagagaaaggaaggaaaacttttagacagtgcatatctgagcatgtctttatggtgttcctacaatttttaaaaatactttggctgggcaaaataattctgggttgaaaaatatactttactgttagatgagtgattatgcaggtcatatttaagtatgtaaacttatttcctccaaaaaatgggaacattaatttatttgagctggatatgcttcaaaatgattctgtctttgatggaacataaggactaataaataacatagaaaaaattcctaaattttggagagctaacctttgattctggtaccatgtctcttctaccagaagttaaggatgtttttttgaagctggaggaagggtatcttttagtcaggtgattaaaccttgatgtaaggatattatagacattgttcactatatcacggtcaatctatgaaggaaaaaattttcacactttattaacaataatagcagtatttcccttggttttggaaactgtgagtactgttcctgtttccctctttagtccactgccaggtggttcacagccaaattcgagacccacaactagcattgtgaaagggacctctttgcctgtgcattggacaccgaatacatttttccttaccctttacttctctttagactggttgccttactttcttttcttaattttgttttgtatgcatctttgccaacttccacaaatcctttttgaatggatggaggcagcagtaatggaataaaggttcagaatgtcttaccttaaacagcctcacatgggctttctaaagagagcattattttccattcaatttcttaagtcttttgtgctgctgtatttatagtaaaagtggtaccagttatcgttagtcattattgcaagaatgctcaacaactagctattcaaaactaagttaatggaagcctacagaaatatatgattattagcatttcttgtttgaggggtttaacaccccacatagctttcgaatttttcctctgttaattgagaagcaactgctgacttctatttgatagattcctaagaaacagacgtgatcactttgcttggttccagaaataaataacaacagtggttgtagcaatgacaataacagctaacatttattgagctctcattttgtgtcaggcactggactgtgtttaaatgcattatttaattcttccaacagccctatgaggttgatattaaattacttccttgctctttcatgccaaatccccctgaaactcccacatatagattaatctgaccatctgcttctcacttgctttctacatttctgaaccctcctgggaaaaatcactccacgatgtaccttgatgctcctagacatttgataaagtgttgcccctcctcctgcccccacatgccttgttctgagcagtgcacagagactattttaagacttcactgctccctaagccctctacttcttgaccttacctcctagttgagagaaccctgaaccctctccttcctcagtttcctgctcttacacctatgaagctatttcctaccatcatcaccctttcctcctttctaaccagtgatcgttagacagcattgtgcatcttaattacctgggagcttttagaaataactcagcctagtcctcgtcctgaagaggaccgttcagtaggtctgctggtgaggtgaggaggaggaggagcccaagcctgtgttggctgtaaaattgccacaggagattctgatgggctccctggttaagaatcactgggtcaggttccagaagacaaagtacctctttcattcaagggtgatccctcacctctcctaaatgaaaattcaggagagaaggaaatatggagctctggttcccagcttcttctttttttgttttcttcaggactagatctgctctcattattcctgtctctcctcagttttcattgacccccttttccctgtattcttcactagcttccaactagatatgtgtttgtctcaaccctgtgagcactggcctgattctcctgctattcccaggcaaaccccttaaagaaagattataacatcactcaggtatacacaccactttgttattctgacttcagtcctccctgaatctggtagagatcatcagcaccagtagaagccaaatccgaaggacgcttttgggatctgtctcatcttggtatctttgggggcatatggtgcttaggagactctttccttgtctttgtgacaccatccactcctagttgtcctgcttaatttctttcatgtgttaagtgtttccaaaaaatatttttcagcaacattaagaataatatggaactgtatttacaaaaaggaggatgtggaagaatattcttggggaggaaatgtctttctggctggggtctggatctagcactttatttatttatttatttatttattgtgagataggagggtctcactctgttgcccaggctggagtgcagtggtgcaatatggctcactgcagccttgacctcctgggcccaaatgatccttcaatcttagcctcccaagtatctgggactacaggaatgcactaccatgctcagccaattttttgtaaaattttttgtagagatgaggtctcactatgctgcctcggctggtctcaaactcctgggcttaagcaatcctctcgccttggcctcccaaagtgttgggattacaggtgtgacctaccgtgcctggcctgaatctagcattttctatgaggaaaatgagaacaccaggggaaatttggcatgatttcttgaaactcttgcaaatcaaattcagaaaactagatttaggtcttagatttttgtcctagatggcaagggaactgtgggcccagagtatggtttctaccaatttaagaaaacccatcaggtcccgggtccactctgagtctagggcagatctggggcacccagggtgtatattcctgtgagagccttactcctgctgtgtcctgtgatcctgacaatgggccagcttcccagaacattggtggacagctgtatgcagcccagagtagaacagctcggcaataataactttttactcctttctgctttgatttttattacttccccacctcctgatttttccatacaaaagtaaagcatacttgctacagaaaacttggaaaatactgaaagagaatggagaataaaataaattttttatcactataatgtcactcagatatacatgccactaaacacgtatattttcttccagtcttcttacttttgcaagcacacatatatatgtttttataagtaaaatttggatcaaactgtatatagtgttgtttattccttttttgttttttggtaataatatttattgccataaaaaattcttatcaacataatttttttatcggttgcctactattctctagcattgagatagtcataatttatttaactaggtctctgttgtttaacatttaggctgtttcctatttgtactcttataaataatgctacatttaataaccttgagcagaattgcttgtgcattgctggtgatttctttaggacatgtttttagatgctgaatattgttggatttctgggtgggaccagcactcttgtgattgtttggcctccagctaaacctgcctctgggagggagggaggctcagggtccaagggaatttgcctgctcctgtttgcatctacttgagctcttttagactgcatgttgaatttcagaaggaggcatcaaagcatttctccaggaatccataaatggcaagtcctgccacaggtgaaattgagcacatatgcttcagaataattccctatttgatagagactggttttgaattttctctattctctgcatgctttggagaaattctgaattatttcaaagaacagcaatggagcacctacaatttgtcagacattgtgcttacctctgaagttagaaaagtaagtaagctctcaaggggctcacttgcagtgtagaagacagagaagtgacctactgtgggtgagaagtcccctgggagcacagagaggagagcctctgattcttggggctaaggaggcagcagagggcaagaacacctgtgctgcagaggtgaagtctgagctgagtcttgaaaaataagaattatttctttcgtacggaggggaaaaatgttccagggaaagggaatagtgtgtgcaaaactgcagacttgcgatggttacatgacacgtcaaaggaaccatgaatacactcccataggtagaatgtaggtagaatgcccctacctcagtgacataccaggtgatggggctgcatagacagttatcctttcattcctggggcttgagcccagttgttcatttacctcagtgtgccttatgaaaaagtttaggtaacactgatttggtacatagtagaaggacaatgggagctgagctggaaagttggactgggtacaaattgtgaagggctgtgtgggccataccaagaggagtttggattcctttgtcagctgtttagagatagccaatctctctgtgaaacactactgtgcaggtactaaatagaagatatggattcccaagttgcttaaaaacacagaagctggtgttcttttacgctatcccaacaatttcgtaacatgtatttttccccctaaataaaaatgtgatgctattagctctgtatactgacctgtttcacacctctttggggaaaatattgcaatgttggaactacacagtggaaacttgcagttgtgaagtctgttttgagctggaaaaaggtgacagtctaaggaggaatgatttgaaaagtgctaatagtaaaacatcagttattttggtatctacaaaagtctgtgctatttactgtgactggtgtgaaaagaatcagtaaatgggaaaattgtgttttggccaacataaattaaaagtatgcatatcaccagcctgttgtattttctttctccagcatttcttattcattaaatatcacttcatatctaaggtctaagaattctccagcagtgtggttaagaataagataaaaatgttgagattccccaagggatattagacagcagtttcttttattatttggttttagtttgtttattttggtaagtgttgtaaatctagaccacagaaataagcataaaagaaaaaaagcgtgtatgttgtattatagaaatagtttcattgataaactctacatactaatatctaatgtatttggattgcctgaatgtgtttgggttttaggaaattataatatacaagcctctgtatatgtgtatgcattttctttaagatataaacatattacagtgatatctctatatttcaaatgtaaatttttttggtaagttgtcattttgtaagttcgattgtcaatacaaagaggtgttttattttctctctgttcttaactaatttcacttcaagatgaggggaatgtggagttcacatgggtagctgggcagtcagcatgttttcattccagtcacgataggatactgagaatttctgcttcctaggtcctcctagtctacatctctctgagcaatagtttacttgagtcaaagacattcagaaatactgtgttaaaattcagaggcgttactgtgttggccaactttttaaccccccaacatagctaatgtaaaggtgaataatgtactccttggtccgtcacctcactctgtccatcaatctgtctgtggctaacaaaaggggagtgtagcagactgtagaaaacaagacaagtgttgagtaggaaaatcagagacagatgcccttcgcactcttgtatcaaaggctttagagactggcacatcagaccaaaagtgatttgtgagggtgtgaatagattttccagatgccacatttcagaggctttcagatgaagcttctgctccttaatctctttccttctaccccttgcctgctttctcttcatgccagtgtatttctggcaattcagactcttggtgagaagtagatttaatttttataaacatacttgctggaagtcattggtctgaaaaaattgtctgtacctaatgcattgatatttctgtaggtcttcaatatgagtccatttttatattccatctttagtggtttcatcattgaagttgtcaacacagacacagtagactgaatcaacatgaaaaataccttaaaaatggtagtctgagagtcaaaagaatcaactgagaatggctaggaagtggaagagccttgtttctactaagtcttctcttcttgctactggctttctttaactgctagaaaatttcaattcttagaagataggatttgcacacctatgaataattgatgtgtaactacttatgaagagttttcactggcattgagggcctgctgttggctgaataggttggtttagcaccataagtcactgacatacttttagctttctgccacctggagatcagtataaaagctggtgagttcagcttctcaaaaggttaaacaattgccatataaccaggcaattctactcctacgtattgtgtacccaactgaaatgaaaatatgtctatacaaaaagttgtgcacaaatgttcatagcagcgttatttgtaatagcctaaagacagaaacaatacaatgtccatcaactgatgaatggaggaataaagtttggtgtctccaaacaatggcatgttgcttggccataaaaaggaatgaagtaatgatatatgctactatgtgaatgaacttacaaaacattatgctaagtgaaagaggccagtcacaaaaggtcacatattgtatgatttcattcttatggaatgtccaggacagagaactccgtagagaaagtagatgactgattgcttagggttgggggggcagtgggtgggaggatgaggggtctgaggagtggtagctacagggtatggggtttctttttgaggcgatgaaatgtcctaaaatttatggtggtgatggttgcacatatctgagaatacactaaaaaccattgacttgtaaactttgattggatgattgtatggtttatgaattatatcttaataaacctgttttttaaaaagcaaggagtgaaaaacacgagaaacataaaattcaagacattaccctgggctatgagaggagggtacatcagggaaagacagtcagatgatttccaagtggtaacgttctgtttcctaagtttcctaagcagggtggtgggtacacggatgttcactccgttcaatttattattatttgaactgcacgcatatgtcacaaatgctcatggtatctgtatttcataagttaaaaataactgtaatctaaaaaacctggttaatcgtagaaaagatatcttttcaatatacagttttcaaatatcaaatgtctttctatggatacttactgttttatcttattgtcatttgtcatcaccatgcctatttcctagtacttcttgagtgcctgtgtccatttccagtgtcctatgcaatgtaatgggacatataatgtaggctctgtatttaactggagaagagatgttattaatagttgtaataattgcgaccatttttgaggggcctgttaagtgccaagcacggttagaggagctttatatgcaatctttgatttgagtcctataatgaccctatgaggtgtgcctgataatccctgttttactgatgacaaaaggaaggcttggagagattaagtaaattgttcagaatcaaagagccagttagcgagggatagatccggaatttcaccccgtgtctgtctactgccagaatctgctgttaacgattatgccatattagcttttactgtgccagtttttcctgaacttctaaaactcatatctccctttgataaacttcataaaaatatcatgtcttttccccagttgagaatctcaatcgttttttctttctccatcagccaagatcaccttatcaagccgtatattgtttagtttataatgcagagagcatttgttttctaggtataaaattaaaccaaatatgtgctctcaaatgacgtatttccccggagttttagacatgttctctcctccccctgcaacacacacacagctcaagaatcttaggtgcgagactgttttgccaatctgagaatccatttttaaaaaggtgcttcataggcaaaggcagtatttgatcaatgccagatggatagaatagcaggtaattttcagtggagcacaaataacaaaattatagaatggaaagaaactaagaaacaatttttcttgaattcccatttgttttttagacaaaacccaagagtaacaagaattgaaatcctgtttggttgctgatgatctctaaaagctaggtgtcttatgaactgaggatgagatgtcataaggtttgttcatccatcctttcaattatgttttgatcttcaactccatgccaggcagtgtccctggggtttttcatcagaaatgtgcaaggcacaacctttccctttgtggagatcttggtcttttgggggacatagatcaagagccccaaattagagtgtggtaataatataataaagcataggaggctgtgggacctcaaaagattgacatttacttcaaccttggggatagaagtgtcagagaaagttttcaggtagtcaatacttgagcagaattctaaaagttatattgagttcagagaaattggtatattgaggaaaatttataatttggcaggagacaaggggagatgagctgccagtgttggtctgggacatgtcatgaaggacctctgactccatgcttacccataggtaaagggaattcattggctggttcaaacagggggaagggtcacaggacaagatttgccccagataaaaattactctggtaccagcctctgaggatgcatttgaaagaggaggacaagttcaagggaaaagatggctgtactcatttgagaagttttaagcatttcgtccatggcatgtgcaattgattgtaagatgctatattattttatatactaaaagaagaaaaccagaatcttaattttcagatgcatcccaattccagaaatgtcaaaatgtgaaaaaatatgtattttagacttgatgaattgcagtaagtacttaataaatatcggtcaaaagaatgcatgaatcttttctgtccgtgtcctgtgtagatttggaatagaataaatacctgataaatgaacatgacatttgatttctaagttgtatagcttcccttagtttgacaaatgaaaattacgaaagagatcagttactgtgttccttgaaggcttgtccttctgttggtattaacagtcactcttgatagcaagaattttggagaaaaaaggtttgagaaatggctgaatgaggaaactatgctatgagagggtaacgttattccctttggatttcaggcctaatagtgaaagctgtgtttgagaacctactggctgcttgtaggtccatcatatggttcaagaggaggagtttaaaaaccagtggtagggtcatggcatgattgaaaagaaatatcgagggataatttagagatctgcccttgggggcacttttaaagggaaattgctgtttgtaagctgctctctcctgcagcagctgggtatttcctgaatctagggcctttcttgtctgttttccccctatatttgctcagtgggattccagccaggaatgtctaagagacaagggcagctgggtctgcactgaccgcgagattgtattttgcttctgcggctgttttgcttcagcttgcaccatttgggggcacttctacaggcagaatgcagcaagcactgccaaacttagatagattctttgcattctccatgtgttcgtacttgtgcaacctgagaaagtgcactgagctaggagagagtgggcaaggcaggtggtggaaagtgctgtctgctcttagacatactgaaaaagtgggcccttttacagtggttcctagaaatgcctgcattgtaaagggagaaggctcattttttttttattttaaaatgtgacagaaagcttgtggaagtgctttctttcagataaatggttattactaccaaggattattactctttttgcccagaaaatagttgaaaatttcctcactgatgagacaaagtatgcattgaatacactgaatacagtatgataactgtattttctttctttcttttctttttttttttttttttgagacagaatctcgttctgtcacccaggctggagtgcaatggcacgatctcggctcactgcagcctccaccttctgggttcaagtgattctcctgctcagcctcctgagtagctgggattacaggcatcccccaccacaccctgctgattattgtatttttagttgagtcagggttttgccatgttggccaggctggtcacgaactcctgacctcaagtgatccacccactttggcctcccaaagtgctgggacttcaggccgagccactgtgcccagcctgtattttcttaataataaaatatgatcaacgctgatggtctttgggaagatgaaggaagtgctgttttcatatgctgaaagtgctacacattaattatgtcattctgcctttatctggtcttgctgactccatccctctcctcccctttctcatagccaccagtttagacattgtgaccagattaaatttctggaatcacccttttcaatatacagttttcaagtttcaaatgccattctctggatccttattgttttatcttattgtcatttgtatcactgtccctatttcccagtatttcctgagtgcctgtgtccatctccagtgtcctatgaaatgtaatggggcatataatgtaatttctttttaatgaattagctgattttgtgaggacttgaaaggagattttgagcaatttgttaaaattctagttattcttcagcaattatagagttttgggaacttctggattatgaagttcttttcttgcagacattagcaggtttttcttggtgtctaggtttttctaagcattgtcctttacatcttatggtcatcaaaaaaaattgtcctacaggtgtcttgtgacagaaaacagaaataaatatttttggaaactgaaggttggtttgcatctgttcactgatcacagttattgttatatactataggaaagggtaagactttttcatccactattttagattcagtactgggggcctacaagttaactgaaaaaagacagattaacaagagaaaagaacagatttaattacatacatatgcatggaagttcacaaagaaatataacttaaggaagtggttagaattgggggcttatatataccatcttaacaaagaacaataaattgtggcaatatgacaagagaaaagaaaggggttttggacttctaggggtacttatttatgtgaagataagtatatggggaaaactaatgaaagataagatttattacagtcaattttgtttatgcagattgaagtcagtgccatcttcagcaataagagttgcctcctcttcctggtatgggagaggaaagagagaacatcttcactgaggaaaatttatgccctgactttaggcagatacaaggggagtagacagctttatatacatctgatgtttgtcagttgcctttagctcaaaataattcttatgccatcatggcatgttttagactgacaaacattgatccccttcggtacaaacactgttcctctattacacacacacatggagatgataagacagacaaaaatagtttttgtcttttgggcttacagtctagatgaaagacaaatcatcccagcgaaggtgatttatgtgagataaatgcatctcacatattacaaatggtagatgcatcctctgggaagatgttaattagtactggaaaagtgcctcaacttattctcagatcactcaggcaagtcacagctcagcatttgtttattctgttatgaaatggaggtgaatatacacttgcccagcttgtgttgaaggaccgttgaaaggtcacctaagattctagatattagagtcctttcagatgatcagtgtttgggctccctttcctataaatcacacatgcacaaagcatagtatctagttttagcaggttcacaacatccatgggcacaggttaagaactgctggataaaatatagctccagtccaagagcagaataagccagcacagttatctcatgaaggataggtgtgaggttaatatgcaccctctctgccagtcagagaagcagcttgatggccttgaactttcagctgaaagctaatgtaccaagaggtgagatcaccaacatcacccagcatcatgttcttcctctggaggcaaatgccaagtgcagcatggcagttattcagcagcttctgtgaacctaaccaaggcatttagttccattaattgagtggctgtgtgcgagaccctgtgaaataggggcttttcataggcatttgcaatttgtaaacaactgctcagtccatgagggaatgacggtgagaacgaaaggccttaaaaagagatcgaaggtggttactgcaaccagaggtacaaaaagaggctgtaaccttgcatagttattatttattttctactttcagtcctacttgtgctgcattcaaacacggtgtggcagtaattaacactgagtgaaggtttgacagttgggtggcattttaatagctaaacgaaagtaccgagagtaattacccgggatctcttccatatggctgatcatgcacttgcacttttgggcagaaagaggcacctcactcactaggctttgctcccctttggtaaattcgtgccacaaaggctcagaggtctcctcacatgttccctgaaaatcaaatgtgttgataatggcttggcaactgaaggtgcatgagaaccttaattactttggtagtcaggaccaccttgtcacacagctccagaggaaccaatcaagatgtatttgcatcatgttgtattgtatatgaagggtgcctcttggggttgtgtgcagaggcacatcaggttgccagcctcaaaatagatgtaatgggttggcagaaacaaggggcttctccagggaaaggttgtcagggaatttgttgtaaagtttcaataatgaacggcttttatgtcttgatgctctctgcttcactatgtggctgccatattgccatttcattggaaaccctgatcaatcccctaagtacatgctggtaggagtacccctgtgggctggctgcacttcaattttaacacaaacattggcaaatggaggacattatcttcctaaaagaatctcctgtggccacatacatggcacagaacaggctactctatgttccgttaaatgattcatagatcccctaatgatgggtttaatgggcatgtaacatctgtccattaagattatgtcctcccaggtgctctaaagtttccatagcaagtgctctacaaatgttggtacctcgtggtgtctgcttcttgagactggggtcttgactttttattcatagatctttagtgtacagtacagaactggcacagagcaggcactcggaaaatatttttgggaattattaatgtgcaattgaaaaatctgtttatggttgctgacacagacttggtgaaatgagctttttgtatcaaaattttctaagtaatagtgttagccagcaccaacggacacagtttctggtacttccattgcagaagtcacattcccattgttttctgggcagtaggaaaaaagatggcatttttgaggacctaataagtaccaggtggttgtgctagatcccttgtgaacagattggagattgggcaaatcctgactttaatcacttatttgttgttttggggcctcaggtttctcttctataaaattaaaatactaatgtccaccttagagagttcatgtcaggattacagaaaatgcatgtaagtgcttagcacatagtaagtatacaagaaatgaacactgctattaatcaactcctttgtgtaacactgagaacttactgtcagttttgatactgttaaaaaactagagataccaataacattcaaaaactgtatgtacttcaagtagcttgcagtctagaggtggagttaggcacttaaacacatagttacaatacatggcaagtgctatagtcaaatactgttagaacacaaaggagaagcaactaagctctgctggggaggaggaaatgggatttaggaagggctttgtgtacacgatgcttactctgatttgaagatggaaatcagtttttaaggaagttgtttgtgaacagactaactgaaagcagttgaagtagaacacaaaggtagtgtgtgtgtgtaaggatgcctatgtgagtgctgaagcagtagggaagaagtcaccctttgtgggagacacagttcatccccaagacactaggaaactcaacaaagtaacatagattgctcagtcacatagctaatgcgtggcaggacctgaattttaaactgaaatgatttctacaatgaccagtgctctttgcatctttttatacctaattttaaaaatatgtaagttactacattttaaagtgttctttgtattacttcttagagacccctaaccttttcagaagagtatctctattcaataatgtgtgtcaatgggaagttgttatgttttataaaaataagattctaagccaggcctttctgtggtggttgttggacatctctgcccagaggaaattgattaggagggataagatggcactagaactggaagctgagggcagtcatgccagctctggcccaggccagtctttgtattgagtactttaggatatatggaaatcaccaaaatacatacaggctgtttaattattttgtatcactcctggagatggtcaagtaaaataaacacattaaatagtcaattagttcactggcagcaatctttctttggaaagatctgctcccccccgtcccctccccccacactccttgctcacctatatttttctgatagtacagtcattatttcagttctgttggagtccaagttctgaaccactaggccattttaactgcaaatttctcctgagaacatacaatcactctatccccacctgtaagataccgcaaaggggagaactaatgtttcctggccagtgctaattagaaacttcatatgcctcactcctagtggtttgaaattcataatcctacaggtggctttgatttaagccaaatagttctgttcaagagagaaagattactgtaatgacgcagatttttcacttcaattgttgtcattattcttaattcattatttgacttaataatcagctgcacaaaatccatctcttcctaaaaatatccccagacacatactccttaagtttcttatctcataaaagcatttgagtatagtgactgagaagggcacatgagagggattttgaaagaactatccctagaaagatttgaaacaaaatgtggaagatgtaagagccgatgtcaggttttggagatgtggctgtaggcttgctttagttacacacactggcaaacactggtatctcaatgtaggagacactctatctactagcattatgtagttagcattgcactatagtatggttaatgactgagtggaattcagtaattaagagtgagaatttctgcactaataaaagacacttacctctactgcctctcaagtaggccttcatttctgaactttgaaccactcctagaacagggaactgatagtttaattgttgggttgcttatgtctgtttcctcattcttctaaattgaagctgccctcttaatgattaaattattttttcaaacttttaaattgtaaaatatgtactgaaaagtgcacaaagcaaacatgctcagcttatttaattagcaccagtgtgaccatctctctatttaaggaatagaattgctctattatttgcctcacagaaaaacctccctaatccagagacctgggaggagcagggacattttatattgctgaaaggtaagacaataataatttttgaagaatcttattcccttttaggtttagacaataactgagaaaccctggagtggcaaagtttttcaacagaggtcctggaacaccacctttagcagagaacactggctttgatagagatgtctaattgtaattagcaagtgactggatgtgaatgatacttgactgaagatttttaaaaatgagatttccttttttatgttattacttttcttgaaatctattctatatggacaatagacaattaaacttctgttcagctctaatttcagtaattgcaaattctgaatgagtagaggtgaaataagaagcatttattgtgtttgaaaattagggctataaatggtataggtgagcaatacacttctgaatgtctttatcaaaacatccctgtgggtaaagaagaggaaactggaaaccctagagattctggtggactgactgagaaacctccactgcaaaccagaaatttgttagcatctttgtgttttatttttaaacttgatacaaacttattcatgtttaatttaacatattaaaaaacaccacgaacaccaaagtttttatggaaaataggctttccaaaaagatatgccgtggttgaatgcagcttcacagattctctgggacccagctggtactctcagaggaaggtatatttaatgatgtgaagatacatgtattcatctctctccgagttatttatttatttcacaagaaaaagtaaacaacaacttataaatattttcttgttgttgatcttggtaaaattatttacttaaccagcatttatgaaggtccccctgtagcctaggtacagtgcatgtagctaaagatattaacatgaatggagcccagcttcagctttggaaggagcaggagcatagctgagtggggaatacggatgtaaacaagttattacatcagagtcatttatgtatttgttcatttgcctgggagaagtgaggcctcaaacagcattttgttcaaaaaaatgactggcttatattctttatcgcatgcatgtctgccattttgtcatagccatgtgtgttcaatacttgaaatccatttgccttatgaaatgcttacggaatcctgatttctagaaataatttaaagtttgctgaatgcatatgctgtcctataagtgataggattgttttatcatttctgacagaaatgatacatgcaattaacatgtgttcttttaaaataatactattaacaaagcaagtttatcccctctactgatatctctgtctgtgtacccaaatcctgcaggtattttaaagtctagcttggtgcccaccttttccattcagctccgcttgactgtgtcagtttgtatcgatttcctgcctgtctgaactctctttgcatttatgttatgttctgcttgtctgacttgttagagcagagatcccaaactccatcctttctcctttcttgagcagggttcttgagaaatggatgatggaggttcctccagcaaatgtttcctctgtgttcctcgtcagagtggctgccacacacctccgtctagtctcaggcctctgccctgacagtcgtgagactcccttctgatttctctcttaacccctaggctgagagggccccaggtttgctgtgaattccttttcttctagggcccagctggtgtcccctcccactcctatcccagtattttcaaagcagtagatacctcagtcatcagcccactgagaaggcagagctacttgtcccctttggctcactcttcattctttccactaaaactccatcctcaaaccagtggccttaatgtaccgttttgacctccgtgtgcccttcatgtttggccacctttgagtgtgagctcagtttgtgatgggtatgttgtattttagtgttacttgataaacaccgacttaatcatttctttgtatttggcaaaattccttcattctctttagctcattttaactttagaataactttagttcaactctgagaggcaagcaggctgcctttattcttatttctacttgataggaaaagacaccaaaggctaaaaaatattagtggccttgttcaatgtcagaaaaattataaacgatgaagtcattttcagtcatgtgctcttctaaaacacagttcttttgcttctcttcatttatatttcatgtattttaatctatttttactaatctgacatgtcacttgagggccagctcatgccataaatatctgaatcctttaaaacaccaaacagttcaacttaaccaaacatttattggatataaagtgtagtcatttcctcatttagtgagagtctttatgtattagactccccgttggatgttttctatgtttcccctcattctcatcatatctctgctgggtagattttatcaatactttggtaccattaatatgcattgggataacttgggaatcttattaaaatgttaatcctgatgcagtaggtctgggcagggcccagatttctgcatttgtaacaaggttcccagatgagttggatggtcatgggtgcagtctgagtagcatgctgtttataggtgaagagactttggctctaagagattaagtgatttttcaaagataacacaactggaagtggtaaagccttattcaaatgctgatcttgctccctggagagttgccttccaagtgcagtaagacagatacattcaaagcgatctttggaatgtactttaatgtggaatttactctaatggagtgtaatgggaggaccttaggtaggaactatgatttgaatctgatctcaaaagactggtaaggctttgactgacaaagatgggacaaaaggactttttggatagcaagaacaaaaagggaacaaggacacagaatgcgggagtgtacagaacatcttctgggaatggtgagctggaggctgtagctgatgcctggggagaggtgtgctgtagctttaaagggaggctgaggttggatgggagagcagagtagaccggggaaccactgggagatttggaggacagtgtctgtgatagcacattgtaggtgctcaggaaatgtgcactggttgattgaatgtaatctagtttttagtcatctgttgcccatgttgcaccattgagatctccacagaattctgtggcctggctgaaacgccacagaattaccccaagatgacctttactgttgtttatatagagctttcttaatagtctctttgcctttggcaatataggacatattactttttcctccctttccaaatttttttttggctaagaaaatgctgcttttgcacagaccaataatacacattcttcttaaaagaagcattgttccttcagtagcaacttgtaatgggaaaagtggaacaaagacaaaatgcaattctggtctgaatggagaccagtttttctttgtgtgaataaccagcattccagtcaggttgccacagtgatgctgagattataactgttcatgccagcagtcagagaacgttgcccaattagttattctcagctgctaggttaccttgacagtggctcaaaaagcaggttttgagttcaaagacactcaaaaaagagcagtcgaggacttgcaattctgttgccctcagtggggtgcagagaccacaagctccagcatgctctggtttaggccatgtaggtgtagtcagccttgtgaacgtaggcaccttgtaaaaattctggtctttccttgccccctgtatcatcagccagctttggaagggattttactgtttctgggagctgccttcagatattgcacatgggagacagtgaggagaatgtatgttttggcattggaggctcttgtagcctcgctttttttctcttgtgagcaatctacttcacaggattgatgcagagatgaaataaaataacctttgcaaaataccctgcataatgtctggggcatggggagacattcagtgtgaagcagttcttctcaaatattgtttcaaaagttacaaagcattatacaatatgattattattatcatcagtttctggtcttttctattctttcagtcagagtagagtaggataggatatggtaatgaacactcttagaggctttatataactaaagtttatttctcgaccatgccacatgcctagagtgggtcagtagaggactccattcatcagctatccaagtaccagactaatggaggcatcatgtccacatatgcttccacagtcatcacaatgatttgaactgtcagtcacatattccatctggaagtggaacatcacttccatgcacactttattagccaaagtaaatcatgtggccccagccagcttcaagaggggtagggaagtgccatcctataacatgccagcaggaggagaaatagaacatttattcaggccgggcacggtggctcatgcctataatcccagcactttgggaggctgaggcgaggggattacctgaggtcaggagtttgagaccagcctggccaacatggtgaaaccctgtctctcctaaaaatacaaaaattagctgagcatggtggcatacgcctgtaatcttaactacttcagaggctgaggcagaagaattgcttgagcccgggagacggaggttgcagtgagctgagatcatgccactgccctccagcctggctgacagagcgagactgtctcaaaaaaaaaaaaaaaaaaaaaagatgtattcaacaaccttagagactgccacctctaccaaagagcaaaaggctaatggagaagagtcctttaaagaaggaatgttagttaaacataaatgaataaaaatatctgaacagtaaacttcaaagtaaatcaattagatttcagctgcttcaaacagaaaactcaaaatattagtgggttaaggaagatagaagtttgtttctctttcaagataaagaagttcagacataggcagcttagcggtagcatggtagctccatgatcgtcagaaccataggatcattttattgttccgctataacaatcttagcataaggcttccattcttaaattcacctcaggatcagaaatggctgtagtgttctagccattacatctgcattccaggcagcaggaaggaggagggaggaagacagaagaacccttctcccagctaagtcagctccatttgggcagcccttctgaatgccccacacagtaattctgcttacataccattggccagaatttagtcatgtattcattcctagcttcagtgggacaagggcatgtagattttgagctgggtgcatttcctcccaaataaaattggaatttttgttaaggagcaaggggagaatgaatattgggtggcattgatccatctctgttacagtaacttaagatgcaagctttagttaagtaggaatgacacagaaaagattgctctatacactgtcattttccattctatgctctgcagaatatcagtgcttagaggagatacaaagcttccttaaggagtgttctgtggccagacaagttaggaaaatatgaaaagctttgccctgtcttggagattcacagggtacattaacacattaaaagctttgagaggccttgcagtaaagaaacccctaacctgctaatctttttaacctagtgttcccaaacttatttgacagtggaaattcaacacccatggaaatctggagggacaaaaggactggctttagcttcttgagtctgccaaaaagcttttagatccttgaacagatggtataaatcccccgttccaaaatgttatctgccttgcaaaactaataagcaagcaaataaatttgtatgtccttcacggtggcctagccatagatataaaagcttgaaaaaaaaatagatgcaaatgaagccctgttattaacatctgtatgagatttataagagttggtattggtcagccatctgtaccattactggtgacaccaagtgatggactaagattggtttgtacctctgccagatgacaggtccctgctccaggtagctattattgggctcctggctgttcctacatggctctgggccatctcacccttctctggaaatgggagagtaacagatgatctaatcaaccagccaatatttccctactcatagaaaagtcctgggcccttggccgaaaggcattaaccctgcccctttcagtgtgcacaactcttgccctcatcagaggttccctctgcaaagggcaaagaaggaagctcactgtattgtgaagaggggtggggacaggtaggcagctggtaaagggggcctcatactcctattagacttagaatagagttaggtcccttttacctaaaagtttcacctctgcctgtaatcaacttcatggttgcttataggtgtaggaagaacagttgaaaattctttcaagcaaataacgtgtcattggtctgttgtaagcaggtggtaaatgagtatctctgggggaatggtcccgttaaggctcttcttccaaaacagaaccttgaattgtttcctaatctttctttcttaattatttaggtaaccagctcttgtctttaaatccatctcctgcagttgctatctttttcttcatctaagtatcttcaaaaaggcaaaaggccaaaatatttgctagtctggttcccatcatttccacctcgttttgctggaaatactggaaagttaccctgtcctgacaggtctggaaggatcccatgtttgcaaatctttgtaaactgtatgatacattttcccaaacagctgtataatctctgcaacaacctgatgatgggagggaagggaccaggttgagcaggggctggggttgggggtggtcatgtgcatattgacctttaaagcaacttgcgtgtgtgtgtgtgtgtgtgtgtgtgtgtgcgcgtgtgtgtgtgtgtgttttgaccaagtttcgcttttgtcgctcaggctggagtgcagtggcgtgatctcagctcactgcaacctccacctccctggttcaagcgatgctcctgcctcagcctcctgagtagctgggattataggcgtgtaccaccacgcccagctaatttttgtatttttagtagaaatggggtttcaccatgttggtcaggctggtctcgaactcctgacctcgtgatctgcccgcctcagcctcccaaagtgctgggattacaggcgtgagccactgtgtccggcctgcatgtatgcttcttaaaagacttttttagaagagctgagaaaaattacaggaggtgatggagagagctatccttctccaatatctgtcttgtggcttagtaccctgaagagttttcttaacttgccttatggagttggtgtgcctttctctgactctgaatgtgttagaaaacagtctctgaacacacagttggggcttgtgcattccttgtgtgcacaagcaggtttgtagtcgtgacttgggaatttcaggtcaagaagcatgagaagggctggccagtgaatcccagcagctgacaaaggattaaaatagctgtgctatgcaccaaaatcagaaaaaatattcaagtcagtgttacaagaagtccttggattgttctctttttagttttatattcttagttgtatatacttatttatgcaatgtaagctagtagacaataatcaatttatgtagaattatttgttttcatctgtaaggaaataattttgaactgagctaactgtgagtatgaatatgctaagtctgtgaaccgagaaaaatatattttgaaaatattatttatcttttatgctgatatatatgcatgtgacctactaaatggactgtcaaactggccatgtgcactaaatcttcttacatcatttctggaaatgaatgaaatcgatttcttaacccaactacctagattttgcaaaagaacagcagggcctgcccatcctacctactgtccctgtttccttcctttccaggtccactttttgaaaggcaatgggtgattccatcggtttactaaagggtgaaatcaaacagaaggaaaaactagaagtcaaaagacataggtcttcatttaactctgccactaactaggataagacctcagataaatcacctaaactatcttgctggagaaatctataactgcataagtatatagagcctgtctgggcctctctttgctcttctgtaaaatgggtagagatattttattgatatgatctcagaaatcctcgctgcaaatgtcacagaccttaccgcattgtggctgtcggtggaagaagtggtgatgtgaggacttgctccatccagataatatttattgaatatctctgatgtcccagtcatgatcgaggtattggagatactgcagtggacaaaaccaataagagttattcattcttggagtaaagaaattattctttcttgagtaaagaatttttagcgaacactttttaagcacttacaatatgctagatgttgctttacacattttatatatattaattattatatcaagtaatccagcaaagtgggtactaccattatcagtattttatagttgaagaaacaggcatagaaagattaaataacatgcccaaagtcatatggctagaaaatggtgaagctgggattcgattcaggcttttggctgtagagtctgtggttttcactattatgctataccgcctctcactgtcaattaattggttagcttaaagtaattagcattcatcctagctaatggcaaagtaggaaaaaaagaaactagctttagatagaaatctgagagcctgtttgctctccctctctggggcttctggctctgataagaggcagggacaccaagcaaccatggtatagaaaacttctatgctcccagccatttggctcattgtggtttcctgtcctgaggtcactgcccattctctggctctattgttaacccacaaggccttcagcatccccgtaaccccaggttaatttcagcattggccatttgtagagaaatgagtaataatggacttggattcaaaatacctggatttgaatcctggctctactatgaaccaatgttgtcatcaccttgggaaacttctcttaataccaccagcaagagcagtatgtctgtagccattatttattaagcactgccatgcattgtgctaaatgctttatatatgttgttttggattctcagaaccatcttccatgacaggtatttttacctttactttacagtctggtcttggctgctgtctctaccacttactgtttaatcttgggcaagttacttaattccttgacgccttagttttatcatctgaaaattggggttagtaatacctatttctcaggttgcataaggaagaaatatgaaaatgtatgaaaagcatttaggctatggcctatcccaatgacaacgataatgcctattatagcttattgtatagcttaaggttttgcagtgattaatccgaggagtgatgtttcaaatccagttctaaaggccgactttgtgaggacaggctggagctgcagggtcttgagtgaagcagctgagcggggagggtgatctaaagcagtgtcactgctggctgctgcacattagcaggtgaaactaagcagactgcaaaccaaacaggaggtgaggaggctccagtctccctgttctgagagatgaaagccaaactggaagctaccagtatcgagggttagttcctggaggtttggctgtgttctgccagtagccagctgatcattgaggagctggtattagtaagaggataccaacactagccaggaacagctctatcggagcagtttgtgtcctggaatcagcctacactcaggacagcccttcccaaaagacgatgcttgacacagggagctggggagttacctagaacattcatacgcaggatgcgacattgtaaaaatgcaggccaaagggcactttcccaaattacagatgaagaaaactggaatatgaggggtgaaagaactctagtaaggagtggaatccagacttgaaccctaattgttttggaccagtcctgtgataggtttgcatagtttaatttgtcctacactgatgatcaagtaagaaaaatcaacaatcagtattttacctacctatagccatatctctctcatctatctatctatctatctatctatctatctatctatctatctatcatctatctatctatctgtatatatttatgttttttacttgaattatctattccagttgagatgacttctttgggccagcaggttaatgaagatatgcttctgggctatattccagatctcctggatcaatactcttggagcaccttttctcatatgctgcttgtcgttatgatgatctaatcactatgtacgtgtagtaagttgctcatgtctgcttccttccttagattggaagcaccatgaagcaggggccatgtaccccactgcctctaccttggacagtgtataacacacagtaggtggcgagggagggtgccaggtagcagtcagggattaaataaatcttactgtgtaaagcaagacctttgactctgcaaacctctactgctttagaagaggggaagttaaagtaaaaaattacctttgagggaacttgcctggctgtgagtgcagcataaactagaatctgggggttgttgagtcagcacagtttcctaatgctgtactttcgaagatgatgttgaaaagcctgaagcctcaagataaatgtggagagttctcctactgttcctgttttctttgttctgttttgcttttgtaagcatatgcttgtcagttagggctgaaaccaaacaaaacagctgctaaatatggttctaaaagaaataacattttggtcttcttaaggcccgtaagtttagagtaagcacagtcgtttggcagatgtcaatagggaatccgggggtagcagtcattctgggagcactatcagccatccgtattctgttgggtgtattttaccctgccagaggactggtggcctcaagtaaaagattctgtcacagaacggctgtgtctttaagaggcgttttggaggaggggtgtctagagtctgtgtaggccatttgctcatgatccgtgtcaatttcattttcaaagaagtggggaggcattggaaagaatatgtatcatcttttatgatgtgaaggaaatagtcatcctagttacagacttaagtttgcctttttcaatctttgggatttagcccagtggtgttatttagtgttcttataaatccagtatcattcagaggacctggaggaattaaagcataacctagtggcagggaatatcaaaccctagatcttaaatctctcctctctgctgtgaagctgggcttgagcctgccaatgccatctaaatttcatcagctgaaagaaagagtatttatttcaacatccaaggaacccccaaaacttaatgcgccttctcaattgtctaactaatttttaaagagacatacattttgtccataaatacctgactctgtttgctaagcatgtggtgggtaatattattggttgaaaagcaataggttttcgtttactggccagattagttttattggcttttttagttgaaaatctataaaatgcggactgaattttactgtggcatattctttgtttattacatgaactcattttcaaagatgaaaaagaaaagggaggaagaaaatgaatatttattaaagtcctattacatatcaggccccaagctagtctagacactcacagttctcattgtatctcccaagggaggtaatcctgtccacattttaaagatgaggaaactgaggttcaatgcagttctgaaactggctcaaggttagagagctaccaggtggtaaaccaagggctggggattatggttccatgaagctatgatatagtgattaggaactcaaggtttggagtctgaccatctgagtcaacatcctggctctgccgctcattagtagtgtgaccctgactaagcatttaatccctccgtgcctccatttcctaatctgtaaaacaaagataatgatagcatccacttgataaagctgtgataaatgagctattcatgaaaaatgcttagaatcgtttctgacacataagtcctcatgaaatgttcactattactgtaatttttattgtcatgactaaccaagtttgcttttatcagtactggctgaaaaattacattttctttcaaggaatagtctaccttttgatatgtagttatatttcattatgaaataatgtaaactactctaccttagaattaaattctcttctcaccctcccagcaaaggttaagatctgaataaaggcatgtgtggccaacagggattcttgactttggtaaatgtcaatgatttgctcttttctccttggtgtatgtaactttcttccatgctgctcatcctggctttaagagcagctaagcaaacacaagagggagaattaagtggatttcttatctcttagctttcctgtctttgtaacatgattattaggtacagcttcctctccttgctgcacattctgttggccacattctgacagcctgtcttctcaatgcacgtgaggcacagtttactacaacaggctctatggattttatttttttaagctgggaatactacaggggcttttacatgtgacagttttgtccatttgggattggggtaaggaggatagagggcacagtggtaaaacaacttgtctagatttaaaagaaatgatgtaagtttgctagacctttggctctacattctgatcccattttttgtgatttgcactatacatgtcttgaagaattgggagtgggacatcaaccttattcagtaaatagttatatctagcagttatgtattggacagcatgctaagtgctggaaataccaagataaatatgttacagtgcttgctcttgaggcatttgtaattcatcaagggagagaaatgtaagagaggctagcactatgtgaaaatggttatcatagagctgtgcacaacatattgcggctgcagagagagagaggcagtgacgctgatttaagaagggcttcagaaaggaggcagcaagctgggctttcaaggatgggcttgcctcataaagaaagcagaaggaataatcttggcagatgggcagtatgaaccaagagctgagtgtggtatgttagggacatgagggacatgtgttggttatagtacagaatgatggaacacaaggctgggaatcgaggccaggcctaagaatgacatgaccttgactttcagtttgaaccgtatcttgtattattttaaatcatggagtgtcatgattagaaatgtctgttttagaaagatcagtatggagaatagcttagaaggaagaaagaattaactaaaagcaaatggtcccagaaaaagatgatgaagcctgttgtgtgaatggagtggagtagatggatatggtggacatttggagataagatcattgacacttagtgaacaaaattaggggagtggtggacaagggtggaaacttaggggaaggtacctagaaggtgtgagcagaagaaatattatagaatctgtgagagagactaagaggtatgatagaagatggtggagggatatattttcaacaggagtagtgatgctcaggagtataaatgcctcaaaagggacaactaggacaggactgagaagcaaccactatgtgtaagaaattgaggttcatggtgaccttttggggaaattactttagaggtactctagaatggagaaaacagctaaatgcttatactgttcaagctgtatcacaattctacaaggatgtaactaatgatgaaatgcatttgtgtgaaagactattcacaaacattcagctctccaggcgcttggattgggggaaagagagaagagagcctagggtcagtactgaggtgtcactgaataatacctctgacttccatatctagggtttcaaagagccccctccttgcaaataccatgactcatgctattttgctttgttactctcaggatactgtagactgtagatgcttatagacttctcttttgattccagactggttcttatttctagccatggtgcttgtagtgtatgttgtggtatgtcacacagagctcagttctccactgctgaggcactcagttgtccaccttctgggagtgtaggtagctagggatgacgttcatctgaaaaatgtcctcagctgaacagtgtcagttcacctaagattgttacctctgggacgggtattggggggcatcccacatgcagtgactagtcaatggagatgggatgcaaagtcctgatgcttccaggtaggataattctccagggctgtcctagctccagcacttccatggatcagatgaagtttttgttaccactacatttcagttcagctcttcctttggctcagtccagttcttcctttactccccggcaggtgttgattctgaggcataccccaataaactcacacagtataaatctcagggagtctcaggttttattcctggggaacccatctgatatgatgattctttccagtttggttgcctatgcaaggccagttgccagtagaactctttagttcctctgaactttacttctgaggcccttggatgtgtccagcaaaaaccttctcctagcagtttgaactaaaggctcagcattaagcctccttggttttgattggttgggacatatacccaagaatagattattcaaggagagaaaagagcctcacaagtcagctgtccagatcttcctgagacctacctactaaccccagctctgagaggggaccctgaggcgagtgacctttggatgtagaagctgattcctgctctgcacctgtttgtgctcctgccctcatctcacatccctgtttgattcccaggttccttgaggcagccactcatcactgtcctgtatctcttctctttctgttattttttttttagttaagaaaaatgaatgttgaaaacacaattgagctatttcaagcaaatgtaggacttctctccaaatatgttgcagaaacaccaccaagcaaacaaactactgggaagcacagcttagaaacaaacagcagctgccaccatttatgggctttttttttcttttcctcatttctttctaattccatttgtaataaaacctgctgctctaatggcctagtagtttaaccaacaaaatttttcttcccgatcctgaggcctcccaggtggccttgatggtgtcttctaactatggggtgttggtcgactcagagctctaagtcccttaagagtgttttccggttttgtggttctgtctggaaccacacctcccagaccaggtggggcataactggaacttctggacttctggatttttcaggacatgagcatggagtgtggtttcttgcccttctggctttgtaagagcaggtaatgtagtgctaactccaatctttctcagtgactaagtgcttaatctgttgggtgctttgtttgctttttgtttttgtttttatttgttctctgtgtggaatctttgaaggcacctacgcaggggcttttcttgagtttgatttaccacagattggactttaaagcatcctgacttgtcagatcaaactcatttttccctttccccagaatagcagataaactcattttccccttcccccatttaaatcctgctggtggtgtggaatttctcagcttaaaagtgattactattaggtgttaatagatttccgactacttgaaaggcattgtgcaaagcccacacttattcttcacaagagcatggctaggtagatgtcatccctgcagacccagacaatatgttgctttctcggggtctcctaggatcacacagctggtcaaggcacagctggtatttaacccaggtctctctgaatctgaagttcaggctgttccctccctgcctcttagccacccattgtaataatatatggcattgctcttatgtaagtgtccagtagagacaggccaaaggcgcagtctatttttatttgttcctaagaatgttttttaaattaagtgcctaaaacttaaaaaataggagatctcacattaaatacaatgttcagtttctcttgaaaaatctttagacctggcaatattgtgctcatatgttgacaagacaacaagtggctccagctaagtaaactccaccccaccccaccctaccataccataccctacctccctcaaggaggctcgggttgcccagtttgccacaggccccaactggaccactttacttgtttatgttactggcctggcctctgtagacatttaagtttgtgactcctagatttatgcctttaaagaagcaatttctgtccagttaggaatcagtaaggggtgaaagtcaatttctgcctctgaatagaattttattggctttgatttttcttttcaactttttgggatagtaattcagttataatagcagtaattttggatatttattgaacgctgtaacatttagctgactcctggggttagtggacaactgattggtggtaagaacttgaataattctccaatttagtttgcattctaaatcctgcagttactcagcaggtactgcaggaactggaggctatcctcaaaagtatattttgtagaggcagtattacagaagagatgaatccaaagaaaaactttctgagagaggtagttaagttgactctattttcccttggaaactgttgactaccataggtaagattgccccacaatgcacgaacacccttcttagctaccagggctcactcaacacaatgaacagctcggatatttcaaagagaaataccctggaacattagaaccttctcaggatgatgagtctttcactttatcttgctgtagctcctgcaagtgtgtttttccatttaacagtgagaaatgtgttacttcttttttattatttcacttgaaaaagcatctccttttgcctgatttaaacacatttcatagaaatgtaaaatggaaagaaaatagaacttggctaatttcatagctgcagctgacttaaattttaaaattttgatagtattaaatgttaacacatgagagcccctgaagctaaagttgttatttatttgcttaatttaaataagtatttgcttttgattaaggcaatgcctggaatattgttttgaatttttattgtttgtttattttctttcaggaccccgcagggatctttgaattggtggaacttgttggaaatggaacatacgggcaagtttataaggtaagtacattgagtctgagagtggcttatgtacggtttcagttcatgaatgacaaattgcagtgctgtctatactggctcataaatggctcctaacaaatttaaaatgaattaatatacttgttgattgactctccatcttttaaaatatatctgtggttatgttgcttaaactggattctgtgatttgggtatttcccttcattatatattactgtgtttgtatgtgacacatgaattctgatggcacatatttgaagctcttcaagcgttcagtttcctttacttaatcactgccagaactggtttttgaaagagaaaagaatgccatctacttcagaaatttaagctattaaactattacagctggaaaagtagatgtgttattggcctaggacatgaattaaatgagtggagtgaacagtgttggaagaaaactgggttacctcacaaagcaaaagcttaatagcagcgacgaattttaggaaataattaaaagttaaacttgagttgagactgagctgtggaataagaagtcttgcttgcctgtgtactaatttctgcttacaaattcactcaaaaagtgtttttaaaaggtattttccccaagtataatctacgaaaaatggctggttgaaaatgtgagttgattccttttctgattgtcaaaaaaaaaaacaaaaaaaatgaaagtgaactgtttttggactgaaacttttggggtttcattgaatgagctattgaaatgccatcaaaacaaaccaactgtttcctcatgataatttctagggaaatatccatcattttccctagtggcagcgatatgggatggcatttccattacaaattatctcgtgttctatttttaaaaattcctcctgagccctaaacttctctcagttaattaaatttattatagaaatcattcaggttgtaatattttcaattctgcagaatgtcaaaagtattatttatagggtattctcgagattctaagtggatacacatttatatgtttatttacgagaggtttcctttggtgtccaggggaaaattctcccttgcaagaaacgattatttcctaaattgtacaccttttaccattagacagaatgtagtctacccaacctgctcacttgacgttgatcctgtctgacacagaaagaaatgtgtctcagcaaaggcttttaaatactttcaatgaagataattaggttggaagattgtgttactgcattttgagaaactggattgaacttgtgaagtaactaatgaattaagctctgacttaggtacaaaattacttctgatttgctgtcaatatgaaggagcaactctgtagcatgctgttggttttatggtgccatttcttagagcctttccgtttcattatgtttcccacccatagaatatacatttgggagacatttcacagcttggtacactaattcaagaggtgaaactctgcagtcttataagaggagataccaagagattcaattaaggatgagaatatttggaaaatccagaattatccataatttcttgttatttgaaaaaggcaaggaaacaaatggcaagaggtctcagatctttttagagagggaagatatttagcagctaggttgtcaacattattattctaaaggattccattctcttggtggttgatacagtactatggcaccttccaagtttaagggagattctgcaaagaatggtcatggtgaatgcagtgaactttgggacaggagatttgctctcttttaccagccccattgttttgtagccaccacagcttttctgtgtattagtcaaatgagaatgtagttagagatgctttggggcctggccaggtgcggtggctcacgcctgtaatcccagcactttgggaggccaaggcagatggatcatttgagctcagatttcaagaccaaccaggccaacatgatgcaaccctgtctctactaaaaatacaaaaattagccaggtggtagtggcatgcacctgtaatctcagctactcgagaggctgaggcaggagaatctcttaagcctgggaggcagaggttgtggtgagccgatatcttgccactgcactccagtctgggcgagagagtgggactctgtcccctccccccccccccaaaaaaatgctatggggccttgtgttgatttacttaaagaattataactccctacctacctatttaagggtttggtttctaggcaaccagacgatgttaggtggcactgctcatgagcagaccctgtgtttcctgaggccactaatccagtcctgctgtcattctgagttctaaaagattaaagtttaataaaatagcaaaatacgagctaaaagatatgtgagcctaagtaaattacattaaaaagtgattgcactatagattatgcaacttttatggaatatgtatgtttctaaaatactgtaggtataaatagaaatgttatagctctaggaggaggtccttatacataaaatcatatgataagtattttctttctgttaaatactgtattagtctgttctcccgctgctatgaagaaatacttgagactgggcaatttataaaggaaagaggtttaactgactcacagttctgcctggctgaggaggcctcaggaaatttacgatcatggcagaagccacctcttcacagggtggcaggagagagaatcagtgcccagtaaagggggaagcctcttataaaaccatcagatctcatgagaactaactcactatcatgagaacaggatgggtgaaaccgcctccatgattcaattatctccacctggtctctcccatgacacatggggattacgggaactacaattcaagacgaaatttggttggggacacagccaaaccatatcaaatgctaagcctttgattttaatttttaaagtctctcttttggcattcctggttttcataaagtcaggtataattttatgaataagtatatggacatagcccttattttatggaaaaatttattataagtttcttttttataagctgccctaagagagtcataatataattttgtttacaggtagttttaaagaaacatacttaatataataaataaaaagtatatgtaggtattcagagaacaccttgaaatatatctgcatgtgagtcaggtacatctagatatagaaatataaatattttatataaaagccatttaataatgtttagtttttcaaagttgcttctagtcttactcccaattttagcttattcctgttttgggcaaggttagatttgtttatctttagcattttagtcccatctaatcaagtagtgattcaatgtctgttttttgctttatttaccgaggagcataggtaaataataaagaatagtgattcactctcaggacttttaatgaggaaaccatctccttctgttcatggctgcattaaaaaataaaccaacaaaaggccacatacccatttactaaaggtcttggctgtttattggcatgccatctattgggaacctaatggaatctggacacatttttgttaaaatagagtaattcttttaataaattgaaataattgtttaatgtttactggtaagataccactacaaattagccacaggttttaaataaatgttggtttttcctgtctcctaatttgcccttttgaatatagattggttattacggaaatgaagacatattttatcccagggtgataatgtgaattaggaatatgaaggattcctcagtatttctcatatttcttttcaatacttcttaaggttgtaaagtgcaaagtagggaggccgtcgtggtggctattgtgcttaagagagacagatgctgtgagtgtgtatatttccagcatgctataagagtcttcatagtcctcattctgagttctctgccagctggctgttcagcccatccttcatgacctccagtcatgtggaactcattacttttctgtcagtccattttcctgcagttcctttgaatgttatcacattgtgctgagatcctgccttcttaaaatgtttaccatttcaaccccatttcatacctctagagctatttaaaatttaaaattaaatattctttcacaagaatgtagaacttttgggccgggcgcggtggctcacgcctgtaatcccagcactttgggaggctgaggtgggcagatcacctgaggtcaggggttcaagaccagcctgaccaacgtggagaaaccctgtctctactaaaaatacaaaattagctgggcgtggtggcacatgcctgtaatcccagctactcagaaggctgacgcaggaaaatcacttgaacgagggaggcagaggttctggtgagctgagatcgcaccattgcactccagcttgggcaagtagagcgaaactctgtctcaaaaaaaaaaaaaaaaaaaaaaaaaaaaaaaaaaaaaagaatgtagtccttttgtgtagtccttttgatatttgaagaaaatttctccgttcttcctccaaacatatacttacatctcctgttgtccaggcaatgtagcctcagttgcttgattcattcttatggcatagagctgaggcccttcattatccccacgaactattctgtcactaaaagtcgtgttttatgcttgtaaatagttttatattccataaaaccttttgaatatattatttaatttctatattagaatgagcaccttgttctcacttcagggtctttaaagtcatagttccctctacttagaacactttcccccagccctctcatggctggctccttctccttcaggtctcagctcaaatgttaccttctcaaggaagccacttttcatccctgtgtctattacagctagccactgcctctgcttccctctgccatagactttctttattacattaacctgctttattgtttttatggtattgccactctctgaattatcttacttccttgtttatgtctgtatttagcaatttaaatacataagtcaagggaaaattaagtcagagacctagtctgtctaggccatcactatccctagtctggcacacagtaaatgttgacacttctggggcccagaattgagctatgttttccttgataattctttctatatttgttcccagttttaaattttttttagcattttcataaaatgttaatctttgtactttagaaaaatatatttgcacaaaagcaataaacaaaatcctctacctatttttttttttttataatgggatggggatgtggatcttatgtttaatgaattaccagtagtctgcagaagcaagactatgctagaaatttacaaaatgaggcaaagcaattttctggggtctggtctcctggcagaggtcctcaaactttagtatgtaaaatgaatatttgggaaaggatttaaaatgtagatttcccggctccaacttctgaaattttgattcagtgggtctggggtatcctctttgaacatttaataagtataaatgctcattctgttgttcaaggtcctgggaccgcacctccagaaactgcaaaaatgattgtatgttatcctgttataggtcacttgagtgaatgctaatcctatactttttgtaatcatttattttaggatttccatgctgactcaaacttacataaactgagaaaagcaaaaatcaaagatcttgccctgagatgtgatacccgcctgttttggcttattcaaagatttgactttcagtgtttttatttgatatgcttatgattacagtttaaagctgaataatttaactcaagacctgagaatcaatattgtcaaaactgaccttatatagcaaaatcttggcctgttgggtggagattttctcaaatctgtatatcacgatctcttcattaaccttctgttaaaataagataaaacatttcaatagcaagtttattaatagtttatttatggaggtgattctataacattatcctggatgcactgtagcttttcatagcctgctgcaatgaatcatgtattatactattcacttattgtttggcaaggagtgagtatgggagaatggtgtgttttatagataatagtggcgtttgttttttaatcaagaatttctaacataaagaatacattctttcacatttgttgagtgcccatgaaaaaagccctgtgctttgtatgggaataatgcagagctaactgaggaggttcctactcttaagaagtgcgtaatcagattatctaattaggactgagtgttcactgtgcaccagaggtttttatgtatattgtctcagttattcctcatggtggttatggtctcattttactggggaggaagaacatttattaaatcacattatcactgtaaggcagggtttctcagcctcagcactcctgagatatggggctggataattctttgttgtgggggctgtactgtgcattgcaagatatatagcagcctccctggcctcatccaactacaaagcagcagcacccctaagttgtgacagctgaaaatgtctccagtttttcctgtgtcttctgtgggggtaaaaccactgctctaaaaatcacacagaatggcaaaactcttaacattgaggtgcaagtggggatggtgagagtgtagactatttaggaattaatgctgtccaggcagagtggggacctgaatgggcacaagatgtgggtttggaaaaagcttagaggctttggcatttccactgtatctgggagtgtaattgagcatttttataagtggaaagagtataatgaaaaggactttggagcaggactgcctgagctggattcctagtctggttttgctctgttccagtcatgtgaagataatcaacttaccctgtgagcctggatttctttatcttttattaatagtacagattagagctgttaatgaaaactcaagtataaaacattaatatgtggaagcattcagctcagtgcctgacacatagtaggcactcaataaccttttcctcttcccaaacacatgtgccagttcttcccatggtcttgctttcatagaacattttatgacctaaaagaaacattcatagaggaatgaagttagaaacacatgtctttgtgctccacattctacatttgatttattggtttttatgtatgcttagaatggcattatttgtattaaatattaggatggtgcaaaaataattgtggtttttgccattaaaagtaatggcaaaaacgacaatacttttgcaccaacctaataccagtattacttttaatggcaaaaacagcagtaacttttgtgccaacctaatacaattcttacattgtatttggtgatataattgccacttggatattatatttggtctttagtgcttaaaaaagccaatgtctcaataatgtgtaaagagaagataggttaatagaggaaacaggaatcagttgcagcactgtggaactttggtggggtgaaaatggtttctgaataattttatatttcacaagttttggaggagaagcaacagtatttcttcttcaggtagcataaggtctcaggagagagtctttattgtgagattagtgaaggggtgtggagcagcaagaacctcatttagatattgaggacccgttgtatggttttggttctacccttaacttgccttagctttgagcttgccatagatctatttggaacttcagttgttctcatctgtaaaattagaatataaagaaacagttttcatgatataacccatgaagctatcgtgaggttgaaatcaattaatgactatgaaagtattttgttaaatataaattcctatgtacatgtaaggtttgattactgctattgtcatttattacaataggaggtggcagattcctgttatcttggggtctggggaagtttattcctatgttgttatttctcttcttcatcctcaggctttattatctgttcttaaagtgtagttttgctagaattaaaggtaacaattttacttccattctccaataagtaggagaatcattcacctttgaaatatgttggcttgatgaatttttcatcctcatagatccccaagttgtttgcatctaatttgtctgaagaccatgccaccttgtgctatgatctgttgagtataatgaattagatggttgtcatgtgaacatggagggaagaccttcgtgggtgcctgtgtgctagatgccatatgggtgggtcgattgctctactaggtagttgaacctgtagagttgctaccaaaacttgatacagggactgtgtgggatttcttattgctactagtggttcgcagccttcactttttatagaaatcatctggataattttgcaaaactatagataattgggcctttctttaaaaatttgattttggtttgtctgatgttgggctggggaaggttttattccagaccttcccagatgcttgcaatgcacagccaggatagagagctgctgggctgaggctgtctgtagtgtaagtgctcttttgggtatctttgtctttggagatgagtctaccccttttagctctatcttggggttttgtttacctttgtttatttattcagtgtcagccttcataagtatctaacaactgcctggcattgccatcagggcatggtttatagataaacatgtggcatggtccttgccctccaagggtttgaagtctctgggtggagagacatgaaaatagatcacttcaatgttgtattccatgcaccacagcaagagtatacagagcagagccaaatctgtgggggctgtgggaagaccaggaaagccttcatataaaggtgactcttgagtggagtcttaaaagatgaatagatgtatgtggaaggggaattaagtaggtactctagggagaggtagtgttaccaaaggcttgactgcttttgatggcctgggccagggtcaataacctgaggtgaagtagggctgggaagcctttaagacagacatggacagatggctcttctggccttgagtcttggccttgagactcattagctgtgtgagcttaagcaagtcatttagcttttctgggccttggtttcatgtataacgaagaggtctggctagagggtctccagagttccttctagatatgacatcctttaattctaagtagagcactagtctggataacctccacaagttgcttccatgaatccacttacagcctgtgcttttccaactgcaaaactgttacagcaatactctaaaccattagcaaaatgatttatacggaatgcctaacattattaaggtacccatgtggcctggtggcattgcttggtgtagttgatgtgttgaaggatgtagacacatgcacattttataccattctctcattaattcagagccgcaaggttttagcaggttctcactgcctcagtgaatgatgatacaaaatttctaatagtgatgaaaagaggatgagattttctgttagggatggacatggattggcactcgtgtgctcaattttgatttgaagtatttagaatgctttagtccaaaatactttcattccacctcatattgtatcaatgagttgccaaataacttgatgcacaaccccctcatgacttgtagtttttagatctcataacacccttaatgacttcgtgattataaggcactttcaagtaattaaaccatcaatagttactattctgggttatttgtaacctgtaaaatgaaaccccgccaggattacaggcacagaatttagggctcttcacggtttttaactattttgtacatgggaaacatttgagactctttaataaaaagaataaccaattaactgtggtattgagattgtatttcttatctctgtagtttaaccttaagtataatttcattaaatctgcttggatattttgcatatgcaaaaagaaatatctgctgttcggcaagcaaatatatgcttactactacataggagcgttgttggtggtgagggtctagaatggggtcattacaacctctgctgctgggtgcagtggcctctgatattgcttcggatcttggtcctgttgctcactttgcaaggagaagcacagaactactgtgtccattttgttcctctctacaacaaaggcagacaagtgtagcagctggttacacaatttttctagataaattacaaaatgtctgttacaacaatcatgataataataaccatatcatctttgtggacagcagggaagagttaggaactccatatgtgaagaactcagtctcctttaaggagaaggtgacttcttgttttagaaaacttgcccgttactgtttaacatcttcgagttgatacttcgagtatggcttgagaaattcagttttgatctgtgcatcacattcagggaggtggtatgaggctcctagctgaatttatcttactggaaatctttttagtggtacctctttctcttatcgtagaacgtacatacagtaattacccccttagccattttaagtgagcatacaattcagcagcattaagtacattcacattgttgtgcaaccttcaccactacccatctccagaactttttcatcatcctcaactgaaaccctgaaccagttaaatattaactccccataccctactatccctcactccaccccatgccctgatctctgtttaaaaaaatactgttagtaaacttaaaacttaattatagaggtggtggtttcctgggtcatgtcctgcaacactggatctgcaacaagcttgaaatgggtctgcatgtctgtctgtccttacgttggcgttcctccaaggtacctcaccaacagcccactttattatctgcaggtgactgaccgccccacaactgcagggctgcatcttgttctaggaagctgaaaccagctgaagcccttgatttttctaccctgtttatatctaaataaaacgatccttctcaggtagaagtccacaaaaaatacgcaagcattttgtatgaatcctaaaagaatattgtgtatgttttctgatatggtttggctgtctccctacccaaatctcaccttgaattgtaataatccccggtcaagggtggggccaggtgtagatgattgaatcctgggggcagtttccctcatactgttctcgtgtagtgaataactctcaagagacctgatggttttataaaggggagttgccctacacaagcattcttgtctgcaccatgtaagatgtgacttcgctcctcattcacttccggccatgactgtgaggcttccccggccatgtggaactgtgagtcaattaaacctctttcctttataaattactcagtctcaggtatgtctttattagcagtgcaaaaacagactaatacattttctatattaaaatgtctgggctgtggttatttttattacaattttacaaatgagatttctctttaccttaaatgtatcaactattttttaaagcagcaaaacatttttcccccacaggaaactccagtatttgacacaatagcaggatgttctgggaggatagttaggatctacctcatggagccgtccctttgccgacacaacactccccgatgcacctctacctccctccacagagtagccccacacttggagctccagggagcacagttctacatccccagtcacaggttcctatgacatgacctctgcctccccctccagcctcatctacggcccatcctgattcccactgtgtccatctatggtagcacattgcggggcattcgtgcacactgcacacggtgtctgtttatccgtgctgtgcccttcctcaccccctgttggctagcaaccatactatatccttaacacttggttcaggcagcacctgcccaatggggtttgatggttttccctgcctcttctctccgtactctgacctgtttgtaatcctctgtctggctgtctcctattccaaactgagtcagggacattaccttactgtttctctagtaccaatacagagtaggtagttataaatatgtaccaaaaaaaaaaaaaaaaaagtacagaggctgaggcagatggatcacctgaggtcaggagtttgagaccagcctggccaaaatggcaaaaccccgtctctgctaaaaatacaaaaactagctgagtgtggtggtctgggcctgtaatcccagctactcgggaggctgaggcagaagaatcacttgaacctgggagatggaggttgcaatgagctgagatcatgccactgcacactccagcctgggccacaaagggagactccatctcaaaaaaaaaaaaaaattctgctgagtttggaatgccctaactcagtgagatatgtttaggtttgcttcatctcaactgtttgagtatataaattaaggagactgacacaaaatataatatttagtagccaacagcagtttgatacctgataagtaaaaacagtgtccgcctaccatctaatatgacagaagagaataggacaaagaaaaaaattgttttcccttctttttaaaactggctttatgattctaaggctgtttttgtggctaagcacaaagaaccacagctcatctgaacttttaaatagcccattgcacacttttgatatcagagatgggtttttggaggttgttttccatcttctaccatgtctttgggactgtagagttaaacgttgacatcactgatatcaatcataaaacataaaacaatggttttgaaaccttcatattcattatttcatttgaccttcacagtaaccccataagttagatagaagaggtatgattaaccttgtcttaaaggagagaaatttaggtctgagagtttataaatgtcttcccttgaagcccccaggtaagtagtagagcatgactcctgatcgagtcgcctaaattatcttacctccactcagaagtttcccaggaggaaatttgtgtataacatctccttaaatgtttggcaaagattggttttgccctgcccttccattgcatgtttagaatattttaagtagattcttgataagtctgaatttatactatagagcagcgatgccatagcctgtttcaatatatagtgcttctcatctttatagcaaaaatactaaaaggtgattcatggcttggtgattactcattgatttcttagtaaatggggacactgtgtttttgtacaacaaacacaattgtgttttcccagaaagataagaagtggattcttttccacctacaaaaaaggaagcggcataccttgggctacttacattttacaatataaaatacatctgtgttgattatttaagggagttggttgcctcgtttctcagaaaggaggaagaaatttctagacttcttaaaaaatcagctccaatagccaggtgcattatgatttttttttccccccagaaaaactctatattcagactggagcttgataaatgtttgttgaaatgaattgaattgatttattcgctcagcttcagttgtgtgattttgtgagcaaatggatgaatcttactgctctggagaccacgcaaatatttgccaggtgtataatttgtacttttcctctattccaagcagggggaaggccagttacctgttacctggtgtggcattgtagcaagttgcttactctttgcttttatatttcctcctttacagggatgcctaggtttgtgtgtttggggttgagggtggggagagacaatgaaatagaggatggaaagaaagaatttctgggtattgtagaggaggatgacctggctacaataccgagatgtaatctcttggataatttgcatgactgcaagttaggaatacctgtgactctctatttccgtttccattaaggatcacattattcacttttttccttacaggttttagttatataacatcagtaacccaggaatgctagagatgcctctatcagatactttcatgacaagttttagccagagttatctcattctttctctttgtcaaaatagtgaaagttagtgaaaacaggacagtgtgtcctcttctttgggtggaggcaaagctgattttatattctcttcaaaagagttgcaaattaggcagattctgatttctccccagctaacacttctggtgatttcagctggagaaaatgaatgttttgtggcctaaatgtttagtacattttgttctaccattttgtacccacttgtgaacttatgaagagacacttcaaatacttcagaacttcaaaacctttccattccctcaagaaacctatcacagaagccaatcaccaaagcctccctcctgctccatatgaatatgcccctctgagagtgcttcagggaggaggtgcctgaagccaagccctctgaggcaaccccagctttcatggtctgctgtaggatggggaaatgggatgagcagatgattaatacggagccatggctgctctgtccttggggttccagtttatctgttgctcagaacaagatttgcttgaataagacgaatgcctacggttaatcagctgagtaaatagtcataaattaagatgtgaccaagaatccagtgttcacaggggatgggggaaaatacaagacagaaaagacaaaaacaaaaaaaagtctgctaacagaacccaaaacagaatagcaacattgaaaacagaacgctctttgagtattgttttctagtctagaagcataggagatttatggctacctgattaagttgatgagtaatactatggtcagatgtgctctttgaaatttggcctaagtactatgcatcatggtgttacctctctctgaaatctatatatttgtgaatagctaaaagtaagataggtattgacaatgttttctttcacagcccaatcactacttaaattatttctccctcagcagtcttaatctacattctcagtgttgaagaaactccttagtctgtgcaacagtctctagggagtatctttgcatttctaacaatcaactctggagattaattgggattatgaggcccatttgctcataatcataagatttcagtgtctgactcaggatcttgtttctcaggaagcccaagggtaaggacacagagaactcctaggctttagtcttgtgtcagccgagtcctgctacaagctgcccttttggccctccgaggtcctggaggttttcttttgaaatttccttgaggaacacggctcaggtagtggaccagctcaggtgctctaatttcagtgtgagtctgtgggcagttgcactcaactacttctccgtggctggtgtctgtttccaaagtaaatacaggggagaaaatcccctttttacaatcagcaatttgggttagagcagaagcagtgaaagtgcctaatgctgaaaattagttttttaaaacaaggatagctatacaaaggtgtgtaaatctacatatatattacatatatataatgaatttggtgtttgtgctgagttctatgctttactgggagtgagtttctaaattgttatcagttcaagaaaatttttttttcttggtagcgcagtgtcaccctaagacatgaatgtggtcttaagggctgattttgctagaataatggcactttatactaacatacaccttttgggggcatttggagggtagaggatatctacaaaaaattctccagaataaacattttaagaaatcatagatattaactctgaagaagtaccaggaccacaatcattactgcctactattactaagagaagaaaaaataagttaactttttaactcagcttggatgaaggctgggcatccaaaataaaaactttgatttgtaggcaaaacacccatgtggaaggtcacattgcagaagaatattgctgtcttcctagacttgaacctcagaggttaagatgagttcagaactcttgatagtttaagagccatctctttattttttttaatcctgagtcatctcttgtagtcaggtgtttcatagatttagtatgtgctttggttggcagttcttgtctttacttgttaatgtgtctctttaaaagctcaaggaccgaccttgttctgtgcacagtaaaagtagcaatagtatgtaatcccgtatgtatagtatatgtatagagtaactatgcccattataggaaaggctcggtagcaggcttccgcaacatcataaagtaagcacttactgcttagtatccctgctttacagatgaaaagtctaaaccttgcaaaatttaacttaccctaggtcacactgacagtaagtggcacaacctggagttgaacccacaaccttttgacaccagtgattgaaacagatataattcattggcataatgaaagcatggtggggtcgactgctcagtgcaagagttcagtcatctaacctttaatttaaaattttctggtttaactgaagactactatttctagttcttaggatccttgtaaagtagagcagccacctttagtgttgtttacatgctttgtttctcatatctgaccattctaaaaaggtagaaaagaattattctgctcacaaatgacctagtaattctgccaatatgttgaaataaatgttttttaaattatcctatttaggaggagaggtgactttaaggtagaaacccagccaaaatatgttgctattctagaaggttctttggcttgggtcaatcaaataactttgatgttacttttgcatttctgaatacattaaagcctcattagttttcagagaggagacttgggcaaaacttgaccttttaaagtaccttagaaggaggcgtttaccaagcaatttaagagtataaacaggagtttaagaagtttgttgaaagcttctgtccttaagtacccttgggtatcttaagactgtttattcttgttgatatgctaatcacaagtcattcttcagtattaaagcatttcctccaaggaattaatactttcacttaaatagggttcctgcatgtacttggttcattaaactgtactgtaaagtagttccttatttacatagtgataccaacccttgcatcccaaatacactgagttggagaggctttgcagagtattaaacacatttatgtcaaacattcgccattttggaaaatctgaaattatcagttgcttattctttggataaataacacaaaagaacatgtggctaagtcacaaaggggatgcctttaaagttatgtatggaataatggtctccctccatacttggggtgtggtagccttgtggaatccaaaggcttaaaaggtgaatagatttttctgaggattgtctggagtttttaatgccacatgaagatatggaaaattttatggatcaccctggatgagaacccaggatgaacctttcaaaaaatcaaacacttctctttgaagcccaattttgcatttgtgtatgaactagacccttgatactccaggtgtggcctgctgtccagcagcatgatcagcacctcctgggagattgttggaaatgcagaatctcaggcctttccaaacccactgaagcagaatctgctttttaacgagactcccaggtgatttatatgcccatttaactttgggaagcatgagattaggccatctccttggtcctgaggactagagatagcttgattagtggaatgcctttccttggcataaatccagggttcaggatgggcagggtgcctgaaatgcaccatttaacttttgtgttgaatggttctcctgggaactgagagggctcaggcagggcctttttgcccagtgtggttggtttgtcatatcccacagagatgaatcacacatttggataagtgaagaggagaagggagatctcaattctggcagtaaccaggttacatgatgcagagtctgtaatacttaggtggagggtacatgaagatttgcaacatttggctactactatgaattggaaattttcctcccaactcttacaaatgcaatgatagccctgaaactctgtccttcaagatattttggaactttctctggtgctgttatttcatattaaaatgagaaaaagaacaagaacatgagaataaatgaattcttttcctctcaaaaacaacatccaatcaaaatacctaatgaaaaatgaagatgacacataatgcaatttttgtatgaatagttcttttgattaattatatagaagatctaagatgaccttctttcaatggttgagagatctgtcaagtgtttttacagtgataggatagagaatagtcactcagacacacatatacacacctcctatatctgcatgcattcatacacacacacacacacatatatacatatatatatatattttctctatggttgttggggaaagtaaataacatagtttgcatgaagaatacatagggcagcccagccatggtggctcaggcctgtaatcctagcgctttgggaggccgaggtgggtgaattgcctgagctcaggagttcgagaccagcctgagcaacatagtgaaacgtcatctctactaaaaatacaaaaattagccaggtgtagaggcacgtgcctgtagtcccagctacttgggaggctgaggcacgcgaatagcttgaacccaggaagtggaggttaagaaaaaagaatatatgagacagattaaagtgtccagcaagtgttattattatgggaagcagcaggttaaaagcataaagtttggggttgtatcccttgggaccagaatcttggctctaccacttattggtagacctaggcttcattgcttaacctctttgtgctttggttttctcttctgaaatttaggaataatagtacctagctcataaggattaaatgagataatacatgaaatggcatttagaagaattttaggtatacagtgagtactcaaaaaagttagtttttatgtatgcagtatactctgttatctgaaattcagttacaggattgagtttctttgggcatttttttttttttttttttttttagcaacagagctttaaacttgttatatggaaatctttcacttcctcttcctcttaattgcagtagttaattttcctcatgctaattggatttcaacagggagaagaattaacagaaaatatttgaatgtggcattatcagatgtagtcatctaatatcttcaaatgtcatagagagctttttcattctgggtgttgagattagttgtaaagagctctagaaacacctcagaatcctggatcaaacagcctggttcctaatctagattcagattcaacaaatacggattggctaccaggtttgttcttggctaccagctttgttccaggaactgttctggaacaaatacagaggttaagaccataggtttggatctaagcagatctgagttcaaattttgattctgcttattagctgcaatattttgtgtaaatattgtgtaaggacaatggtatagacaatattggcagaggcaaaagaactaattaagaatctcattcaccctcctcaaaaacatttgctataatgttgtattttatgtcttgtttgttctgtaattcttctatatgttcattgaaaaatatatagaatattttcctttgggtagcccatcttctagctccctgggaaagatttcattggccactaaaaacaacttaagatcttgctttgggagtagataagttcattcactcagatttaacaattttaagacatacaaaaaaagccctcgaatactacttttagaagatcctggataccattggctgctgcttattccacaatgaatgtatgctcggtgtaactagaatacgcaagaatggatagctttcaaatattagtggggaaaatatcctttacatcaaaacatgactgaaatggaatggattacaggaatgttggaaatactgggctaaaacattattctgactttccatcatcctgttttgacaggaccctagacaggcagttttggggaaatgtgtcaaatttgtgttgagctagaataaacaatctaattgtgtgacactgcctcttgggaatcaggagtcagcttcttcctcaccctgaagtgattagtttatgccctggagctgtctgacccttgtaaaattatcccagctggtaggactgcagtggctgatctcatttttctgtgaatgtcttattcttgtgggaatctttatcaatcatctgcctctctttgtacaatacaagagttattgtaggattgtttcatgggctagtaaaaggaggtgctttgtaccaaccaacaaatatttcttgctctcttgccagtgtgaaccactaattctgaaaaatatgatatgtgatttaaaatataaataagcactcagaccactatccaaaatttctaattttcccagtagattggtggtggaagttctggtcatgttttactgtttttcttgagagatgaaggtagttgatgatctatatggaaacttttttgggtgttatagctgagagtctgaatcctagtatttctaggattctaggatatcactagttttcagccattcagcaataccaacctctttttttttttccaagttcatcctagaacttgcagtctttttgcttaatatttttcattaaagtattttatttacttaaatttttcaaaaagaaaattcgttgctaccgtaaatgagaaactcaatattttcagctatatttaaaaatatagtacatactttttaaattaaaatatttgcccttgtctcactaaatcatgttggtatttggaccactatactttaagaaataacactttcatttgtgtttgaggcttaccagcatagcagaggagagggactcaaacacaaatgaaagcactacccggtgctgtagtatgactgttgtaggccctccccatttttgcctccgtgggcccctttctccaagaaaaataaaacaacaaaaagttaaaaattaggctttataacctcattggtgtaagacaaatattatatgttaaaacattttctttggcctaagaattagtttttatcttctaattttaaaataagaataattttttgttgactgcaaaaagtactgtaggctctaggtcctgtgctgtctgcatctaatggatacgttcgttggcctgtaaccaccccatcctcttcaagagatctaaaggcttcactcggtggtggtgtggaaaccacaaaaatgaaatgtatttggaatcttctgttatatccttaaaatttagatggattctctttatgccacatgataatcattgttgcgtcagtttaaaattatgttaatgaaattactatagaaaggttgacttaaacaaaatctatggtttcctgctgctgtaatacttggcatagagctgagtgccccagggagtacttgtgctctggtttggaagcacaggcatgaggcatgttaaagtagaaaagcttttctttttttccttttaaacttgtgctcaagagaagaaattgggtttataatggatttacttgttgtcaaaaacaaactatagatatcatcctagcactgtggctaccatgcacagacaaccttaacagtgaataagtaagtccatgcagattctttagaagatggtagaagaatctacacagcactatttggtttcaagctcatttgtaagtcttcttttcttagagcctagtgagtgatttacactctcttagctatttctagcaaagaggaagaacagtcactcttgatgagtgactaaaactgctgcttttacctcctttttaagaagtcacttccctaggtttccttggtattaagagggggatggctttccccttttgtcctctcattactctcttatctaggacaggctattataaaagctttttgtttgtgagatcagttctgatttctaacttccccactcaaaccgaaataccacacttgaagttcccccaaattgctgctgctccgatgactcctgggtattgtacgctaaattcaaggatctttatttaggttctttgctctcttgaaaagaaaatcctaatgagtcacccagtttgctgattgctttgtaggtgtgaccagttaaatgcaatgatagtggagttgaaatagaagaagtcatttgggctagctcatttatcctgaatctaatgtagcctgttggcttctctttacttgtgtgtgtgtgtgtgtgtgtgtgtgtgtgataggcacttctcagctgagggccagctctgcaggcacttaggacttgtataccaggcatctagatgctacttagaactagcttggctgtcaaagagaagagagtgtgctctatgtgtttggtgcctgagctagggttttgtcatttttcttttctttttttttttttttcagcaaatgaaccagtgagtgaagggcattatcacaactccaagaaccaactaggagtcacccatgacatcatctcctgaatttcatcaccaagcccagctgatcctatttcctaaatggttcctgatttctctcttctgttttctgtctctgccaccactgtcctagcacaggcattgcacatctctcatatgaacgcctgcaggactgtcccttgatgttatccttgcagcccctacattcctactgtgcagccagtaaagtcatattaaaatgcttatttgatcatgtctctctcctgtttaaaaccttttgaatgatttcccatgtgatcaagagtaaacttagcctacaaggcccaggatgatctgaacacaaccttcttcttagtgctgttctttctcactctctgggatccagacatactgctttctctttacacagaaaacctaatttgcttcctcctgcctcaagacctttgcacattcctgctcctggaatgttcttctcctgttattaactccatgtcactttctcacaaaactgttcttcatcctccagaagatcccaggccccgtttgggctttcatacccccggcacattctggtggggtgctaaactcagattatagtgatacacattggttgaataatatatttatcagactataagctccatgaggccagagacttgtctactttgcttaccacagtattcccagtaactagcacagacctaccaaagactggctgctcaataatttaaagaataagtagagtgcagtgcaaggatgacatgcgcaaggtgtatatgaataaataaggaatcatacttacatatccaagtcatcagaaaatgtttaattatggaccatatctttaatagggcacaaggttacataatacagcttcagtgatttttcttcaaaaatcataaaatcagtgtagagacttgaaggcatttatctacagtgactcaattctgcatagattgttaagcttttagagtaattaatgatcaaccacgccaagcagagtctgactgcagtgcccttcttcctgctgtttcatctgcctgtgatcctcttctccagacacctctgttgcttgttccttcactttctccaggtctctactcaaatgtcattttattagagaggccttccctgaccaccttatagaaaataacaccccaccctctccattccctgttccccttaccatgtttaatttttttcccgtagcattcatcaccatctaccatccatccatccattcatcattcattcattcatttgttcacttcagtctcttttcactagactgtgccttgtagataaataaggattctgtttttgttgagtactccatccttagcacctaaaacaatgttaaaacaactagatgatactaaaagcatattttttgaatgcatgaatgatcataatgaagaaaagcttactattttatccccttgcaactaaggaataaggaaggggaaaaaaagtccattttcaccttttgacctcttcttgcccttcaccaaaaactgagttccctggtgttttttctctcatatgctgatgtggtgcaaatagcctaggcttgagggtgagggtgaaggtcgagttcccaccctatgattgtatgctccattgcagctcttgacagtctattagaaatccataaccatagatacttctgcttctagggctttctttgtgagcctaagatttaactaccaacacctatgttgtcatgtggcaaaagtaaagaaaaaaaaaaaactcggtgttttcacctaaaaataacagcttgctctttgtcaagtggcagcctattgcctgctcttgcattgagtccttctccaggcaagatgtaatataacaaaggaagagactggtggtcacaagccaggacattgcagggctcattaattacttggaaaatggtgcctgggctgcagccagaatcccaaacaaaaaaggaaatagctcctgttctctaattgacaagttgatgagtgaggtaagaatgaaaatcatttcagtaagtaaaagggggaagaaatcaaatggaagcagtagttgtgttgaagaacaagtatacaattaagacatattcccaaccctgagagggttgattcacatcagttgagaccatagatgtcactgtgtgctctaggccatgagacgaattcattatctcttataaaggatagggaacatcaatttagggtaagtgttgatagtgttggagcctgggccaaagtagatgatatatatatacaaatgagttattaatctcggcagctcctaaatcatttagtccttatgagaactgtgttgcaaatataaagagagttaaatattctcactccagaaaataggatctataattttggcaaggctaaaaattcaaagccatcttagtgaatttgttgtaattaaatggggatcgtttcaagcaggaggagtcagttaagaaaaacgagaatttcgtaatgttgtaaaaagaggtaatttaagaaaagtacacttagtgggttaaacactgttccatcttggtgtgattatattttggagcaatgtttatagaacttagcctgtcactttcacaattctgagctgtgcaaaataggaaggtccggtcacctaatacttagcagaaataaggtcatcagtacctttcttgtgtgatattaatacagctttccaaatttgaatgaccataacatatctgtcccataaaaacactgcattaggagaaaaaggaaaatgaaaacacacacaccccactgctactaccatcacccctactatcacctcagaacccctacaaagaagcaagactttcttgtggttgttcaatagcctataaaaaatgtaaagaatatttatttatggaaagagacagctttggagtttgcaagcaatctcaaggtcaaatcttgtcctttgggaagaggtaaccagaattgcccactgagggtcagatgtttgtaactcccagaaatgtgaacgtaaaatgaatactaaagctgtgctgcaatcatataaagagaaatgcaaacaggggcaagatatgggatggggtttaaaggaaaattatttggttttttgcttttttggggaggcatagaaaagatgagaaataaatgaaactttctaggaagagacagaatttaagaactaagttgagcaatgggaaggagggaggaaacacattcagtttgaaatgttgatttctgctcagactagactgtcgaaggcttggtttgtaaattggttgagcagagtcatatgaggaaggaactcccccttttgttttactgaaacaagtgagtgaggcatctaaactcatttatgccttttgggtaaaccaccaaacacctctttaataataacctacttggttgtgatgatacattgatttggagataaatcaaaagaatcattggagaagaaagactagaattctccattaggatatataactctagaggcactttgagaggcaggaaaatatgagatgtggtataaataatctctgcctggaaaccatgcagcaggcttagtctcaatgcccattcacctagaggttgactccagagaatctgcagaacagcataagtgaacaaaggttctgtttcaaagaattgcaagcaggtgctgtggcagtcattgatactgttcaaatagttctgtactccctccatcctgggcacatttaattactggtgccagatccttcaggcttctctttccccagtgaaggtgaccaacaacctgagagatggtggctgctcagggagccttggtgttttgttttggaattataagtaagattgatgctttattgagatttctctagtttagtctcattttattgggatttcactagtttagtctcattttcattacatcatattgaagtaacatactatcaaaatgagttatccctgttgaggctgatgcagcagtgactgtcaggtttctctactgtaaacggctcacccctctccatgctgtattctttggcaggtccctatgtgcagcccacagctaagaagtggggagttagactctaccttgagggttgtattagtccatttcaacattgctatgaagatatatccaagatgggtaacttataaagaaaaagaggtttaatcgactcacacttccatgtggctggggagggcctcattattatggtggaaggcaaaggaggagcaaaggcatgtcttacatggtggcaggcaagagagcaggtgcaggggaactgtcctttataaaaccatcagatctcatgagacttactcactattacaagaacagcatgggaaaaaccaacacccatgattcagttacctcccactgggtcccccatgacatgaggggattagggagctacaattcaatatgagatttgggtggggacacagccaaaccatatcaaggatagagtaactgcatacattatttgaattcttctgcataggagatttgtcttttctgccccatttattcattcatttattcatatcaatatagattcatgtgtattttattttgtacattgggttatattctaatacaaccttatgtattttgttgctcaaatttttccagctttggccattggaaactctcagttgtctgctgtgcccctttgccacagagacacctccctctttttttgtttttttgttttttgaaaggaatcctcattttctggtaccataaggtgcttgagagtgatgatttctgagtgattgcaacaagcaaagcctttctgccagcctgtggagaacacgtattcctactgagtaaacaaaactctgttgagccactgagactcaggttgtttcacaatttaatctagaccagtggttctcaaaatatgttcctgggaccaccaacatcagcatctgctgggaacttgttagatatacaaattatctggtcccactttagacctgaagaattggagactgtgggattgggacccagctgtttgtgggtaacaaaccctccaggtaattcccatgcacactaaagtttgacagctttaaaagctttatagtttcagatctagtcttcgtaatttatatgagtaacataaagaggccaaactcaatggatcttttggttatatttaaattattatatgttgttccacagcaaaacattaacaaagttactttaaaccaagatggttggttttcttcataataaaaatgtaaaacatcttgaaaatacatggatatgaaggaatattactttgggatggggtatagggcttgctgtacactgggtccatttttgcaaacttctagcaatagctctgccaacttcaggagatctctgttgggatcaaataagatggtggattcaacagtgcttggtgagctggaatgaacgtatggattatttttgagttaagcctctctcctattagactgtaactgccataaggataaagactaggctactaccactgcgtagaccagtgcctgatacagggtatgtgtttagtgaatgtttgtaaaatgatcacgttattttttgggcttttgtttccgcataatgccttgggctttctgccacatctgcacagcacttgtactattattctcttacttaaaaaacaaaaaacaaaaagctgagatgaaatttacatacagcaaaatatatggcttttttttttttttttttttttttttttttttttttttttttttttttgagacagagtctcgctctgtcggccaggctggagtgcagtggtgcaatcttggctcactacaacctctgcctcctgggttcaagcgattctcctgcctcagcctcccaaatagctacgattacagcctgtgccaccagacctggctaatttttgtatttttagtagagaaggggtttcaccatgttagccagtctggtctcgaactcctgacctaaagtgatccacctgcctcggcctcccaaagtgctgggattataggcatgagtcactgtgcccggcccaaaatatgtgattcttaagtgtacattgtagtggatttgatacaggtacttgtactatactaacaaaatagatttatttaaattgactctttttgtcccatttacaactgcattaatagccataagctcatggttttgtagtctgttatatattttccaatgaatattaaaatcagtaacccctagctacctctccaatagctctcttcttccatcctttcagaattttgttcttggaggagaacagcttacttatttccaaatttgtaggctttttttttttccctcccaaataccaagagtcctcaggtcattgtgttgaaacagacagaggagtgacttttggaccacagaagagtttgagagattgtttcaattggactgcctgttttcttgtttttctgttttccaggacaactttggaagaagctgactgctttgaaatcaattcggtacacttcaaaaattaacttgctccataggcatttgtggtacaccagttaaacacagagttctgtgttaggcactaaaagaatatccttagaaagctagctgataggtagccttgtgggagaaaggagtaaagtccacgagtaagtataatcaacaaggcacgatgcagggcacttcagaagacttgagttgtgtgccatgggatcaggcagtaccctacttcagtctgtagatttgttcactaacttgaaatgggagtaaattaaaattcaaactgcactcatcctgtttatgtattcggtttactgataatcacaggttagtaattcagatctcaatggctgagatgtttgggctaagtattgtcaagggattgtcatatctgctttagaactggtttacaatactacactcattttatttacattacaaaagtaatgaatgcttattgtggaaatgtagaaatatgtagaaaaatgaaaatgaaaatccttaatcactcatagtccaactgcctagagactattgctggcctttttgttaaaaatacattttcccatggttaggatcatacttcatgtaaagtattgtaactttaaaaatattagcatttttttcatgtcatcaaatattctttataatattttaatggtagaatcgaagtagattgtatgtatctactgtcctttacatgacagttttatcatgcattccaatttcttgctgttatatctttgaacataaatctctatgaatttttcataatttgtgtatataattatatggacactatttctagatataactaggctcaaaccaattaacacagcctaataaggcagaggcagactgggaggggctggaaaccggcccatgagctggtgtatgccaacaaacacaccttgcaggtgctgccagaaggcctcgtctggcagccaaggcacacaatctgaaaattacagcaacagaccggattctggtagcacttggcatcaggacatccagagagcttgtggagtttcccaagaagtctgcttagatgtcttaagactgagaaaagagggaggaagtctagtgagaagcagcctggccatcagccagcctgggattcagctgaaggacctcggtctgttcaacccacaagcattgaggggctactgtgtaccagcactgtgctgggagcttgggatacttccacaaacagacgcagatctctgccttcatggaatgcatattctaatgacgaaaagcttccatggatggggactgacaaaagcgaagtggcattctggttctagaggaactggatattgagtatattcaagatagactcaggtaaagggaacaaggcagaggccagtgatcagcactggcttctctaatgaactgagctgaatatcagagtggacacatggctagagccacactcatggcaaggatgacttatcaagtctcagagtagagcctacaagtgcatctttctggcctaaggccatattagtccaaacagtgaagatttgcctcagcccacacatggcaggttcagggctgacacctgaatttttacacctggttgtaggagatgggaggtaacttagtgccaatgagtgaaatggagaaaacagaaatgtgtatttagccctctgactagcatgtattatattaggttgttaataaaggtttgttaaagggatgcatgaatttaggagaaaagaaagacgaacatcatggggaaggcatgggagacagaaaataatactaattgatgtagcatagtcattatgagcttgggcagagtcagacagtcctagattcaaacgttagctcttccattctctgtcttcagtttcctcacctgtaaattgggctaataatagtaccttctgcactgtacggtagttaggcaattcctataaagagataagcacacttagggccgggcatggtggttgatacctgtaatcccggcactttgggaggccaaggcaagtgaattccctggggtcaggagtttgagacccttgggcaacatgatgaaatcctgtctctactaaaaatacaaaaaaaaaaaaaaaaacaacttagctgagcatggtggtacatgcctgtagtcccagtgacttgggaggctgaggcacgagaatcacttgaacctaggaagcagaggttgcagtgagctgagatcatgccactgtactccagcctgggcaatagagcgagacattgtctccaacagaaaaaataataaaaaagagttaagcacatttcttggcacacatagtaagcattcaataaattttagctaataaaagtaatgtttaatgtttggcttttgggggatattaacatattacacattctctggtgaggttcagctttcttaacgtcatgaacctagaaaactgggaaaaattactttcataaggatggtgggatttcatatatacacacacccctatacatgtcacttttgttgttgttgttactgaaatgagggcttctccagtttagaaatgaggcaatgaagagtggaaggattaacataaataatcttaaaaaaattgttggttgattggaaatcaaagacttggagtggggagccataagaggaagatatcttcccgcaatccacattaccattataattaccgaaatataggtccacgtagaagagcctggtaaaattaagagattcaaaggtacgtagtttcgattaagctgctaaatagcttcattcttcaatcgtggttagaacagcttctctcccttctgcttatgctaggatggtataagacaaaaagatctagagctagggttctctatcagtttcctattttgtttgggcttctgctcattggagcactatttatcctgagggcatttgtagttctccctctgggcaaagtctagaaatcttttctgcctcctgaaaatctgttgcttgcatggtaatcttgagaaaatatttctagaagtgaatgaaatggccaggcacttcatttaagcagattatcttctaccttctttgactatggaactcaggcctggataaatattctattaggaaaggtgtgatcacagaagatccagtcagcaggtaagaagtatatgtaatacacatctatcgttatggataaggaacagtaagtgggaataagggagcagaagtttcatggaaagtcttgctgaccaacctcaagaatgaaatatggcattgtaactatatccgcccaaataggatgcccaggcttaaaccgtatttacatgcaaaggcgtcccacagtgcccagtattactgtttctttattcaacgtttggacctcatgtcccttcctcatctttgcttatctgaggtcttttgctttctccctgttcaaaacctgctttccgttcctcttgcgacttcctctgtccaggaagcacagactatcactccattctcacttggaggctcttaccttctctccttccagctaaggggtattcgtgtctttgtttttcttcataggaacttcctgcctggcatgagattgccatggatgcctggtggccaggcttgcctttgagctgtgataatgctgatctcctggagtcctgttagtgcacagcacacttttacgttctctttcatgtttggttggcacaaagtgctctggggtgggcagtaggtacttcattatcctcattttatagtcatgaaactggcttagagaggtgaggctgtggggaagaggtgaagctgtgtcagaatccagaggcttccacagggaaaggagctcttgtgtttctcatccccactaggattccagggagcatgaagctccctgccaaagggctgtgctgttaaaatgaacaaaaaggaaagttgaggtcttactttagagcactgcattagagcagtaaccctacttctacctcactttgctgaccttaaacatgatatttatttggtatcacaattggaactggaaaaactggccccttcagggatctatcactgttggttggtaagtacccacaaaactttctagtgcacctggaaatgctgatggagatttttctcactgatcccaaggacacttattaatggactttgcctacctctcaagcagagccatgatctggaaataagccataaaatgtatgtcatcaggtccctccgaggggactatggtctttgttcttagactgttaggcctttcctcagagctgtttatgcttatttttaaaaaattgtcacagaagcttgacttatgtggtcatacagcaggttacagtggcacagagataacagcatatagtagaccctgagagagaggagggagacaaaaacactgaaaatgaaacacagacctaatttttaaaagaaaggcacacagtcaactgataggaggttaagagtgtgctcagttgttacagcacagtatcaaggatatttggaacaaaaggccttaagttagtgtgaaaatggttaactttaaggagtaaaggaagtgtgtaattcatcttaggaaatttgccgtggaaaatggaggaaaacaaaaacccattttgttagttttgacaaggttattaacggatatcagtcaaaatatgttggagaaatttaaatgagtaatgtagattttatttccattactagatactcagttcaccaaagaagctatctgattggcctgtaaaggggctgtatgaatatgtaaagatacttaacatcggtcatcaggcaaatgcaaattaaaattgcaacgagatacactacgcactgtatgactaaagttaaaaagactgacaatatcaattgttgccaatgttatgaagcaaccggaactttcataccttgctgataggaatgtaaaatgatacattctaaagtgccactttagaaagcactttcatagtttcttatggttatttatacacctaccagatgacctggcaaatctacttgcaggtatttacccaggagaaataaaacacacgccagtaccaagatctgtattgaatggtcataggagctttagtcataatagccaaaagtgggaaatgatctacatacttatcaaatggaaaatggaaaaacaaatcttgccacatccatatagcagaatacgactaaacaataaaaatgaatgagctactgatacatgcaacagcatgaatgaatcccaaaattgttatgctaagtgaaagaagccagcctcaaaaggctgtgtactgtgatcccattaatatcacatttcagaaaaggcaaaactatagggatggagaacagatcaatgaactaggattatggggaggtgatgtgactacaaaggggcatgagagaactttttaggattaattgtggtggttatgtgactgtatacatttgttaaaattcatcaaactgtacatttaagatgggtgaattttaacatagattatacctcaacaagaaaaaacaaaatttggaaattgcattactaaattaataaacaacctatgcattttcttttatttgtccagcctttcaacaaaattttcttgcacgcaaacagtctaccaggcactgtgcttatccctggggatagaaatatgaataaaatgagatccttgccctgatcacttttagttccagacccttttgcattaaaaagattctccaagctaatagaaggttgctagtgattggttttcaggaggagacaattttttttttttttttttggcagttggggaaggaagggtgcattgtttatttgtatctctgaagactctgaaagtcacttcaaatgacagtgatctgttgtaagcgctagtagaataatagattctgtcatcaaagggattggcacagtttatggtaaaaaaaaaaaaaagaaacttataaagatcaactatacaggattcaagtttttaaatttaatacaagctaccttcctttcatactctgcttttccctaaggaaattactggagtgtttgaagcccagaaacttgctgtagtccctagaaacaatgtggtgatgtcagacttgggtgaataaacagtagcacctgttcaagacttcatgagtcttttttctccccctctagtcttttttggcacagcctgaggttagttaatctttaaaagaaggaaaacggaatgagccagaaggtagcttgattctagactatttttagaaggctcctccatgctgctcctgagtgccaggtttttgagagcctggcagggcaagccattgctggatgccctaatgtggccatgaatcagctctaggtcctcgcaggtctctgatggccaccagtcctcccggaagatgctttctgtgctgccctctcttctctgtcattctcctccatctcccaggcatcttttccaacattctgttccactcactccatatcctcaggaaggcgccttccagtttctacggtcacagtgcagaggattgtgtatgtgtgtgtgaacagagaggagagagcgagagagagcaagggcaaacaggcaggctacttgggtgattttcctaaaagccaaatctcacattattcttccagttcttaaaacccttctttccattttaatttgttctaggacaagcaccctggtgtctggtgcacagtcattgtgatcagccccacccactgtccagtgctgtacttgacacttcccacccctcagtcagatacttttgttggtgggaggtggtttaggaggggtgatgataacagtggtgggagagctggtgaagaaacaaggcactggtacttgaagacttgctctcagctcctggaacaggctcctgggttgtccagtgtggttggccagggaaggaaaggaaatgatgattaaaagacaaatacgcagttggagaaaaaaactgcctttggcgggaggcgctccctgtgctgtatctgtcgagtaactgagtgctgagcacgatggggaaagggaaaggttactatctggggccttgctaaaatctttgaaagaccttgtagtaggataggggttgcaaactgatggccagagggccaggcatgtaattctcatgagtgaaatggccagtttgctcagcccaaaggggacagccactcctcattttccaattattgccgtgggaatggggatccagtgttgtaggttttttttttttttttttttctttctttttgagacatctgagtctctgtttcgcccaggttggagtgcagtggtgcgatcttggctcgctgcaacctctgcctccctgcaacctctgcctcccaggttcaagcgattcttctgcctcagcctcctgagtagctgggattacaggtggctgccaccacgtccggctaatttttgtactttttagtagagacggggtttcatcatgttggccaggctggtcttgaactcctaacctcaggtgatctgcccacctcagcctaccaaagtgctgggattataggtgtgaaccactgcgcccggcctgttgtcagatcttagattcttcttcttttttttagaaaagctagactttatgtaaaagttccaaaatattcatatttaaaattaaaaagagacacacacacacactccctcccacccccaacaccaactattaggatcaaacaaaatattttcaagcagaatatagttcgaaggccatcaactggggcctcttccctaagagttgtggctgtaacatcaaagaacatcactgtgcttttggcatttggggcaaaataatttttctttttgtggcactcactgtatatcacagatttctagcatttccaccccctagtcccatccaatattgcttttctgtcgttctgacaaaaatgtccccaaattttcaagtaacttatagggtcagctgaggttttcccagttttagtatagataatacccaagcatctttgtgtttcctttgctgggaataatctccggccaaatataacacttcagttcttggtaaaagctaaatttcacatcattcttttatgtgtctagcctttcttatcctcagtcacccttcctctgatttctgtgggttttgtttgggtgaatgcacctggccttcaggttatagctgaatcaggaggtagttggctggcagaaggattacctggagacagttacacatctcacacctttctctggctatagcagccctgactcaacagcagatattctgtcctgaggttcttcccaggaagtgccgtggtgtgtgaagctggcagcgttccggccattttggaaggttgtcataaatggtggcactgcgagctgaggttgggtgatgcatgctctttaagaaaaggctaattttctggaaagaagtttggctatgcctaaaaatgttcatccatctctgaggaaataatgagaaatatgaaaaggctttatgcacaattatattgtttgtaaaactaattccaatagccaaaaacagtaaacaagttaaatgttccacgtaggaaaatgattaaacaaattttgggctagctatatgatgtaatgataagtggccttttaaaacaaagtttatgaagaatttttaatggtaggggaaataccatataatcaaaagatgataggatgtattactcatatacacacagttagatataggtatgcctatttttataggtgattttccgtcttctctatacttttccaaatagtctacagtaaaaacaaatattgctttttaaaaaaataacttttaattttagattaatttacattaaattaaatacaaaagttgcaaagatagtagtgagttgcagttacctatccagattcccctacacttttattacttttaaaaattagaataagttactttaaaaataatataaaatggggttttctagcatatattatcacgagatagcttttcatagtcatttaggtatattgtaaaagaggcgttcaaagaaaaaaattacattatcaaaaaggcccgtgtgacttagactatatttattaaaaatgctacatttaactgagatctcatgcatttcacacatcctggatggaacactggagcgttagaaaaccctctttaaatcatttgtcctaaagtgatttaaatgaatccattgcttatcataggcttgcttttggatttgatgccaaaatagacttgtatttgagaccaaagaagttattcatctttcctccttgagctatatatttagttattccttctcagacttccttagccatataagtcagttttatatgagtctataatggatatgagttttagatgcagtcatctgaaattgaatttaccaagtagatgctattttaatactttgttttgactgatcaactcgccaaaactggaagctaaaaataatacaccttgtcattttagcaagtcaagccatcacagaaaatattaagaaatgacagcaactggtatttacagggctctctttgccatattcctaattgggaaccctttaggaaagggccagggagtggctgtggatctggggtagaaagtggcctgtttttgaatttatggagtagcgcactgtcagggcccctttcttcactcagaaatgaaaggagctggttcaccagagggtgtgagaactcattaaccacccccagtgcttcccacccagcaagggatcagaacatgtgctgctgtttcagagcatcacaaaatcttgttttcatgtgaggatttcaaaggcttagattgttcaatttgaaaattttgtcacagaagcgaaatgggcacctctataactcgtggtggtgttattttgtgggaggaccatccatgtctttttcccctatattttgaaatgaggtcaaacggacctgttccatccactcacttggcatttactcttctttgggtggggcccctgggagtgttttaattcggggtcgtagggtaagaatagattaacatggcatgacaaattggtttgctacaatcataattcgaaaggtaggtcagggtctgaagggcagagtagtggttctcattggggttgggtttggaggatatagtgggaacagaaggatcatatgtaagattcacccaagaaggtttttggccgctaggttccccatctgcctggttaagaatcccccaacaataaaatgcccctatacctcctccagcttacaaggcagaattcctgtgatgtgtagggcaaaacaaccccctactcttttgttattagtattctgctgctttctaagtaaatgttcttaactaagagaaaaatctatacactctatctctagaaggccagctggagagggagaagaaaagaaaattaagagacaatttggttggctatcattaatctttgtttagccttatgggaaaataagccttccttcttctatctttgttagcaggtagattaagttggttaaagaatactgtagtccatgaaagaaaagacaatggcctttacaaaggtattccaaagcagccgaaaatattttttttctttcagctattttgctgtctaagactcaatgacacttgactgatttggggtcagtatctaataagcgcatttcccagatgaaaaaccagcacagctaggccttctccacagagcctatacctaggtctatcgaaggaagaagatcattcagaattttatttttgcaaaccttcaaatgttaagatctgaataatctatttaggacagtcagaactgcctaatggaagttgcataattgagtagaattaaaaaccgctttccttcaggtcctccctcctttcccccatctgtgacaacctttgacattgcacagattttcaaagtcgtactgtaagattagtgccagggttctttcaaaggaggcttgtaagtgaaaaatctgttttcgcatccctcaaagctggaagccataaagaaaagaaaagaatatgcttttaatgaagtctttgcaggatcagctccttgcaacttcagttgttcatgtgaatcaaaaatagcagaaagtaggtcatattgtaaaaatgaattaggcttcacttcacattttattgactttactaggcttttttcattcacagtggttgattgttagctaatgactggcataaataaaaaggcatttattctcttattttccttattttgccatctacttctttagaatatcagtggggcacactatgtgcttagggatttaattttttcatgtatcattttcacaacaaccctgaaagctggaatttttatgctcattttatatgtgagggaactgaagctcacagagtttaaggtaaatgacccaaggacacacagctcattagaaaagatctgcagtttggacacatttctctatctggaggccctgctgttttcaattacattcttttgatttaaaaatatatatttttgatatatattagtgggaaataattaaactgaagtaatattgccaaatcttaattgcctcatgagacaatgaaaaatacttaccatggtattaaataattttttaaaatgataataacatttatttgagcacttagtagggaccaggcattatgaacgagtataggaaacagcaaatacacaaataagtaatagttaacgtgtcagatagtgaagctactacagagaaaaataaaatagggtgtaaggagtgtgtgtatgtgtgtgtgtgtatatagcaagggattcttgcttcagagaaggcatcaagaatagtatgaaatttgagcagaaatttcataaggaaagtgcaggagcaggtctctcagacatctggatgaagattacagaaataacaagtacaaaggccctgaggtgggtggggttgctgtgtttgaggaagaaggaagtggccatctccacagcgccctccattgtttccttagtgacttcctgccacagccaccagctctgtcatttgaatgcctttgtcctcaaggggcagagagactcccttagagggcatgaggaaaggcaggcagaatccacccccacactggagagggtggggagccagtttcatttacatatttaaatatcttcctcacaagcaataaatctcaaatcattttaattgaacatttaaatccttctcactggtaggtatttcaggcattcggctttatgccaattattgcgtcatcttaaaagagaagcttttaaatttattaaacccattacacttgaatatttgattcctgccaaaacataatttaaaatcctcactttaaaataatttggtaaggattagtaaacctaccacaataacctaaactgtgtgtctgcagaaatatcacccagtctctggataggggcaaactggtcctttgaaagggacttttcatggtagccccacgcaggcgaatctgcagtgtcccagtcatctgggctgctgcaacaaaaatatcatgaactgggtggtttgaataacaaacccttacttgccacaggtctggagcctggtgagtccaagatcaagcctccagcagattcagtgtctggtaagggtctgcctcctggttcatagatgatccgattcatagtcttctcactgtgtcctcacaagggtaatggcttctctgggacctattttataagtgcactaatcctatgagggcagagcctttgtgacctaatcatctcccaaaggccgcatctcctaataccaacaggttgggaattaggatttcaatgtaagaattttggggtgcagacacagacatttagtttataacatgcagtttgtctaagaagtggcctggcctgagtcttggagattctgattcagtaggtctgaaatagggttcagggttctttttccaaacaagtgatttttttttttttttttttttttttttttttatgagccaggtttgggagccacagatctggtataaagttgatattggctctatgtaatatagaacaatggagtggagcaacagtttggtctggctaagatgatgaaggggcacccgttacaccttcctttatgcagctatattagttgaggaaggctaggctatgctgcggtaacacattacacacccccctttgctcccaccccgcccaccaaaactcagtggtttaatattttgtggtctgtggctttctcctgcagactccagagctactgttctggatgagcagctttcctccaggcaatgccacgggcatcctggtaacttttgtccagtcacactgtgtcccctagggcctcctcagagttgcctccagagtcagctgaagagagagcgtatccatctttgtggggtgttttagcggccaggcatagcactgtccagccctccagcccataggctattgggtagaaccagtcccttggtccctcctagacatgaggggaccgggaaaggtagctctcctgtgtgctcaggaggcaagagaaatagttggtgaacacccacatggcattggctctacaattgtaacccatagtgcactgcctgatgcaattttttgcaggtcaccagtgtttttccacttgagtctgcctgatactacaagccacttcatactcaggatcatttacctctctgcaaccctggttcagcttagcatgaggaagaaccagtttggttgaactaagtcacactgaggtataattgcataacagaccccctaattgtcccagaaatcatttttatcttaaagtaggagtctcatcccagggatagcttagcttttgtcttttctttaccatagattctctaaaaatttaacagttttacaatgcttcttgcattattggcagcaggggttttcaggggcagagtagggtaggcatcctgtaggagtagatgattctaagtatggtgcttgtgagttggggactttctggacagtctaaaaatataagcagactaggtatgaatcctaagaagagcaccctcaagggcagaggtagtttgctcctatggtagcacaaatcctaaatactcaatgtgaacaaataaattaaacaatattattacctataattgcacagactggtgtttctcaaaggatgatttccagactagaagcatttgcattatctggaattttttttttaagtgaattgttaggctgtatcccagacctacagatttagaaattctggtgcagcaatctatgtttcaggacaaactgttagatttaaattttagataaaactttgcagcccaccaggtgattctgatgcataccaatgtttgagaatcactgggatagattttacctgctgattatcattttatcaaaatctaagtaattagggaacctcagtgggagtttttttctttttttttcttgtgggagaaggaaatgcacataagcctttcaggacacttgttatatacgcttctgtcgttttaggttaaatggctgctgcttttgtgtgtctgtctataatactctgtaacgagaatcagtatcttgaaagataaaggcaattcaaagattaacaattatttttgtatatactacataataaagccaaagaaatacactaacaaattttaaaaacatttaaaaccaatggttgattcaatgcctttgtagttttcctcttggttttactgatcacttttggtaactttcctctttttctattcaaggttctgggtggggtaatttttaggggcttgaaatatataatcttgatattggaaacatttccaattctcctcttccctgccacataacatgctgtcttagtgaacacttctaaacaaatttgaacccacgaagacccaagggcatcattatggacctcagttgttatgaattctggatagagcagatgaggctcgagaagagtgggcacaattctgcaagggctctgggacttgttttctgacaaaagtccctgatgtcagcaaagtttgtctctttttcattcaagaggtagaagcaggttcccccgagtactatgtacctcctagcccttgtgcaaacatcaattaatgaatcaaatccccaaataaaccctttccagagtggtcctctggcatatcagaaaactgttatcggctccccgaaattcttgatagtttactgaccttggctgtttgtactggccacaattaaagttgccagataaaatacaacaccctcaatgaaatttaaatttcagataaacaataacatttaaggataagtgtgttccataactaaaagtatgtaatattttattaagttgaatttagaattaagaatgaacatttgaatttcagataacagataattatactcattataagtatgttccatattacataatagttacaggacatactaactttatctaaaatttaattgtgtttcctgaagttttacttgttaattagttcttattagccacaactcatgtgactatggcaaagggatatttggaggctactcagatgtccagagcttcttaatccctagacgtagccactagtcagcaaaggcattttgcctttggtctctgtttataaaaccatcattactttataattgccactccacttttggatgtcctctcctttctcctctgttggtgtttgtcttcctggtctctgtcctgtttgcagagagaaaggctttcctgttagaaacagcaccagccaatctgagttcttctcttttgttttatttatttatttatttatttattttgagacagtctggctctgttgcccaggctgaagtgcagtggcgccatctcagctcattgcaagctccgcctcctggattcacgccattctcctgcctcagcctcccgagtagctgggactacaggcacccgccagcatacccagctaattgtttgtattttttttagtagagacggggtttcaccatgttagccaggatggtctcgatctcctgacctcgtgatccgcccgccttggcctctcaaagtgctgggattacaggcgtgagccaccgcgcccggccctgagttcttctctttaacaaactggtctctttctgacgactacgtaaatctttccttttggagctagatgatatttggatatgtgtgggtaaaaaacaacaacaataacaacaaaactgacattttcgaaagcttagctacctgcagtcctcttctatggttttttgtatttggtgaataatagaacctttttagttctcagagttctttgtgtaggtaagggtggcccatctaattaccaacaattagatgaacaagaacacctgaccctcgccagctcaggttctaatgagaaaccagtgcagatagtgtcagatacaacagggctcactcagccatttgtatgaaaataacagaaacctagtagcagccatgtaaagtcattttgttctttctgtcctagattccagttgctgcttctctctagagaccttttatgcttgtttagttctctatgaagtcaacaggaacatcggataccaaggaagcctgtaagagtgagagactctgacccaatttaaatgtcctcacagagttcagttactcaaaagaattcaagccttaaaagcacagagccttgaagttactagagctttacccaaatgctccataggttcctggattgcagaatattgctgaaatcttggttttgcccttcctccctcctctctttcacattttatttgggtgacgttctgcttgggaatgaccagctgtcactgccagtagctactgggattacattgcagcatgggcagggtgttttcgttttgttttttaaaatgccaatggatatttactggagctactgtagggattggcagtttcatttctgttttctgtggaggggttttgggtataatagttggattagaaacactaagaaaatcaaatttaaactctcaatctattgatggtaccaagcactaaccatttgacattaactggaaggagataccatcttaatcagaggctaaaatgctccctttgctctagatcatagcttatgaagagcagagtttgaagacagagacagtcaggtggtgtcagtttctgtcattctcacttggattcctgtgcagtatcttcacactgtttatttttaaagaattttcaatctgatgatactgaaattacttcagatcttctctaatctcatccacccttcagactgtgtttagttcccctgatatgtactttcataggttcgcgaaattgtaatgaacatattggggtgggagttctggagggcagagatgatgtccattttcttgaccccgaaattgtcagtgcccaacactgacctcggacacagtaggtgctcaccagatagatgaatgaattagattctagggcaacgtaatccatgcggtgtaatccacaaatcactcttatggcaatacattacaagtaatttttaagcctgatagagttttctgaaggtctaggaggggcatacgtaagttacctatgtgttgggttatgtgaagggaccattttctactcctgccccccagcatacttctgtcatctttacccactgagtgtcaacatggaatatgaagaaagactttgcaagtaagatgttaggaaaataaatttcatgtgctaaaacagatattggcaaacatttttgataagggcctagagagtagatatttcaatctttctagaaatacggtctttgtcacaactaatcaactaccgctcttgtagcacaaaagctgccacagacaatacacaaaggaatgagaatggctgtgttccaattaaacttcatttatggacaccaaaatgtaaatttcatacaactttcccatatcatgaaattctgttcttttaaaacgttttctccccaaacacttaccagtgtaaaaaaattcttaactcactggctatacaaaagcaggtagtggatctgatttgaaccacttggcagagtttcacaaccttgcacttaaaaaaaaaaaaaaaaagaaaagaaaacaacaataataacaacaacaaaaaaaacactaataacaaagccaaagctttggtgaggaaagggggcactttcattttatcagccttatagctttcctgagcactgaaatgagggacatagagccttttcttagtggcttatttttacaccattttgtgtttttctgtatgtttgcctacctgcatatgtgcgtatatggtagaagtagaccaagttttcaagttacgtgtgacatattttcatagcaatttggaatgatcaaaggaaattgtagaaaatacagtatggtcccagttatttttttaaagaaaacacattatactacaaaaatgatgtactttatatatgcttgtaaaaggttctgaaaggtatttactaaatgttaacagtggttacctgtgaaaattgggagtgtcatttttgaagcaggggagatattgatctttttctgacttatttgacaattttaaatgagaatgattcttgctcagataatttcactatttgtgaaattaaaattaattagtaatgtattgaactaaaaaaaagatatttattgaaagaaaacactgagcctgcttctgtgaatctacaaaaaatctgtgattttaatgacattgtaattttttcatattgacccttagtgaaatacagcttttggaaaatcccttctctatgagagcattgctaaataaggaagtgtttaggttttgtaggagtaaaaatagcttctccagggatgttgatatttaaaataatgcaaatgtacaataaaatcccacaatctaaactctggattcagcccatatacccagagttttagaatacatttctgactaaaacacaaaagaccttgaaagcaggtgctgtctttgtcccctgataccaatgtgttttaataaggttccaccagattttcaaagtctttggttaaattggaactgacatttatgctaattagctgggtttgggagtgaaacaggtaaaattgaattacaatgggctccaaactatatttatttttaaaatagtggctctgagggatatttggttctatttgtcagttatttcatatctcgctactttctatcattcccttcccgcctggtgtgttaatctggtaatctgaaatctttttgtctgcctgtaacataataggctgttttcctgtagtccatctgtctcctacacgaggtgaaagtacttttcagaaatggcttgggttgatattattaatctttataagcagagaattccttgaataatttaacagccaaatggcatgagggggacttggtataaaaatgaattttcctgtcagctttaaaaattacagcgtggcctgccttttatctgtgcaactcaaatatcaaaacaatggatgtttatgctctttatacagttttctgttttgcattacctaagacctaagacgatgaagaaacatttagacaattttggtttacttttttttttctgctagaaaaccgcaataagttaattagccaaaagaaagtccttcttgttctctgaaacaacagatgctgcctttgaccttggaatttaagggaaaatctatttttgattacatgtcttgaatttcttggatttgccagtgttagggcagcagttgtgattgagtgcttttgaaagtatatgcatgattttcaaagaaatcagtctgcacagctgttgctaaagaaatcgttgttctccgtccttccagttcattactatataaggttttaaaaattattttttccccctacttttaattggagttatcctagttacagatgtcacagcctctgagctactggtcttccacccgacaccctgcttcgttgcaaaggcctaaggttggagtatgctgcatttgattggcagggtaacattgttcctctatgctgggatggggaaatacagccagtcctgtgtttaggcaagccagcaggagtgggactattaatagccaactatgtgttttctctcagacacagcctctttacagtgctctttgcttgcctatcttttggaaagtcatgtgaatgcagcaaaagctttctaagaaatatgagggccaaatggcattactctgcgtgaagtatgcccacatgggattattagtattttgttagaagaccatttagcaagtttgtttgtttctgaatcaaaatccatagatgctcattgaacattttttgtttttttccataaatcatgtatttgagaaagacatcttgatgatgggaaactcttaccttggagaaacaaagaatcaagtagtgactttatcctctagatagtactgaaatcagaagtactttttccctttaagtgtcataaaacacaattacatttctttccacatattttcaacctgagcaaattgacagaccaggtcagcttttttcctgggtcattttcctgtgtattttctttttatcttctggatgtaatcttttatttgtagaccattttagtgaagcccctagtaacaatttatttaattttattagtcaatttataggcagagggcaagacacattagaatatcatcatgggtactaaattagaaaatttaaatcaaaatgtctatgttctttgagctatgcctgctaattaaagaagaggtaaactgctgaaatataataggccaacgtggaagggtccagaagaaccatggaggaccccctttcctctggcttgatcaattataagagagcaaatggaagaggctatacaactttctccagaaatgggttattttgcaggcatgagcagtcaggtgcatattgaatagccacagattaaactctcctctcctacgctttcggggtcatccttcaagatgcttttagctaacctccaagattgggtgagggctgatgctctaaatttcagtgtttagagactgacccttcctgtaaggaggtacttaagacatcctgtcttctcagatgaatgcttctggaaggcaacattggaatatctattagaatgatttgatatacaacaaggttatgaccttttggagaatacctcagtctcttcagggcattttccttcttaatttctggtaccttaaaaaggtctcgttccttttggttgaatgccttgagaaacgtaaggctataaaggaattttaacaaacttgattctctaatcaactgctcataaatccattttattgcttcaattatgcaaaataaatgtttaaaatttgtctgtcgggtcagccagttacccggtcaactaacctcctagccaacctgctaacctcaatgaatatgttgctctgaaactctttttttttcccccaaatcttcccaaagctattaaaaaataccaaggaaggatggttaaggcatgttttattagccgtagtagttaaacttgttaatttatcagtaaggggaaaaacactctttgtaattttaacttgtcttcatgctaaattccttccagactgtggttagaacttaactgcagaatttttgcccaacaatataaacattttctataaaactatggaaagttgcccattctggaaaaaatctaaagtacaaaggataaagcgtttctcaagatagaatttcatttctggtgtttttgcatgtaattttaaattttattttatattttattttgagacagagtcttcctctgtcacccaggctagagtacagtagcaggatcaaagctcacggcagcttcgaaatcccgggctccagaaatcttcccattttagcgtcccaagtaaataggactataggtgcaatcatctttcccagctacattttttttatttatgtattttaagttttatgtagacagggtcttgctattttgaccaggctggttttgaactcctggcctcaagtgatcctcccaccttagcctctcaaagcactgggattacaggtatgagccaccatgctggccggcatgtaatttttaatactaagtctaggataaattttcttttgcactcattgggatatgtgttgatacattgttaatctttggaatcccactggaatgaaatgtgtttcattagtgcttaaactaagatgtgttaatttgagagtttataaaaggaggtttaagcctagtgcattttcaaagttgctttttttcaattaaaaaaattttgatatcttggcaaaaggataaaatcgatagaccatgtaaagaactgcattcagttttaaaataattaggttttgaagatttattctactgtcttttatgagtaagaacatgtctaggggttttaggaggataggtttaaacaggtttacaatatttccttataagagctagattatgtatacaataagaattaacttaagaaattttgctttgaatttctccaagattttctagggccaaccaagcttattctctttaaacagaaatttaagaccattagtaaataaaaaccttaatatgttttggaaaatgattacttggactcagtatttttttgtggtgtatatgctttggcttgtgtttaaattatgttacgcctgtgttttgatcaggcattaaataattgaaacactcatgttaaataattatgcaactgtctgatttagaaggctggaaagcagcagcaaacctgtttccagagacatttcaatctataggccaggttcaggctaaactatatagtatgactctccttctttctacactgaggtatagaagcagcatagggttggggtggagacagacctagtacaaatctaagcctcttgtttatgagctatttaacttcatgtaagttatttgagccccctgagctttaagaattagatgctttctaaatgtcaagcactatagtagtaataagcacacacgtttcctttccttaggatggttactgtcccatgggaaaggtagacacatgggcacaatttcaatatattctcaagttccaagaagcatactcaaagtgccatggaataggaacacgctgcctagcagctcactccttttgggcacacatttgtctgatacaactacgtgctaggacctggataccaatgtgaacagaaaaacacaatcctaacccctctattgtcttataacctaaataacaaagtgatgactgtaaactagaaagtctggggcctaacttatagggttcgtaagggtgaaaagagctttctttccctttcttgtcatcttcattctgttcactcacgctctgtccagattcccagtctcccatttgcctaagcgggcaaagaggtagttgtttctcttggttaacagttctatataatgaatccctttacagatgagtgactgaatacttcttcctaagaatagttgcattattaccgaagacttttggtggcaccaagaccatagtacatgtctctccatttggcagcatttcagccattgagcagtcctccatggatagctggagtgtctctcccacatcccactatcatggtgcttggctgctatccagatgcctgtgatgagtgatggagtccctggtgcttcctggagagaacaacaaatggtagtcttgcaccaccttgattgttaatatacttggtctgtggacttcccatgctcaaacctaaaccaaagaacctggcctgacccggaacaactgctttgttacaggtgaaagtccttgttattactttggtagttaatcatcttcccctgggccttaaactccaggtcattctctggagaagaaatttaggacctgtgatattatcctatttaagtacttttcagatacgatcttttaattataaaagatatataattatatattttatatgatatatatcatataattatatattttatatgatatatatcatataattatatattttatatgatatatatcatataattatatattttatatgatatatatcatataattgtgtaattataaaatgtaatcgcttgtatatagttcttagttccttaggcaaatcaagtaaatagtagttgcatgggtaaatataaaatacgcaaatactccttatagtaatataagaactatcattcaggcaggaggacacaaaagatcaatgtatgaaccattcctatatattttttccttttgaagcacaggtaggagcaaatcatttcccttctccacaaagctcagtggcttcttactgcactcagaatagcctagtttataggcctctgtgagctgcctttcttccccttttcatccaaagtgtttttaaatccctttagatactctttgctccagcttgcctgggctattaactgttctcccgaagaccatactttatgtctgcaggcctttgctcatactgtttggtcagcagggaataaattttactccttattcatttataaaatcctaccgatcctccaaggctgagctcaaatgcctcctctttcatgaaaccttctatatccctactaatcagaatcaattatttctttctctctattcctccttgttggcctattgtgtgtacctttattgcctgtataggcttttctcatttctgcttgtatctaggtaattcactcatctatccatacattcattcaacgattatttcttgaaagctttatcttgtactgtgcaagaagatgggaatgtaatgggaagcagaaaatggatgctgcctgtgctctgggagcttacagtcttctggcagagatgggtgataaggtgataagcaccaaacccacaaagctaaaactgcagctatgggaagagcggggaagacagatttatgggtctctgtctctaggctgtaaactccttgacgccagtgagagcctctttcttggttaagaaggcagtagtataaaacaactgtgaaatgccctgtgtcatgagtttgtatctccccgaatatatgaggaagtcctaatacccagtacctgtgaatatgactttatttggaaatagggtctctgcagatgtaatgaagttaagatgggatcatacttgattagagtaggtcctaatccagtttgactggtgttcaataagaagaggagaaaagacagacacagacacagtggggaatgccacgtgaagatgggagcagagatgggagggatgagtttgtaagccagggaatgtcaagaaatgttggtaaccacaagaagttaggaaggaggcatggaactgtttcttcttcagaacttccagaaagaaccaactcccaatgacaccttgacacctggatttcagactcctcacttccagaactgtgagagaatgcatttctgttattttaggccgcccagtttgtggtagtttattatggcagctccgggcaactaatacacccttctggagagaagttcatgagaactaatttaatgcacaacaccatggtgcactaatgtgtgggtcaatgattgaatttggatgaaagaatgaatagagtattgtgtttgctctcttcagtggtaagagatcagggtgagttcaggatatttgttccatttcagttgtctattaacaggaaaaaatgtggattcacagttcacgtcatcatcagttgagaaggctggctgaataatggcccgtgtggttgtctttagaaataaagctgtgtttttgtcactgtggccaagggggatataaataagctagtcactaaatgttaaaatggtggcaactcttccctttctgctttcaaagcagaatcttagtcctcacatctcctacccctgcttcctcaggcaattcgtgtttttccctctggttgaaaggctcacttcaggataaagcaggagggggggtttgtggttgttgttactaatgacttttagatcttgtgttgcattttatattttcagaacattttacagttgttgattgagttccctagcactcaggaatttgtgatattaaaatgctttttgtttgcaaaggacaaagatgttcagtgatacttgaaagctacactaatcagatattcatgagtatggggtgcggcctgacctcccttctgcctcctgaatccttctcctcactctagattcaggacagtgccacctctataaatgatcccctcaagcctcataactctctatcgttttattgtgttttattatttatttatttattgtttgtgtgggttttccctagtagattatgaggttttggaggacaggtaaccacactcacccagcaggcatgcaggaactatctcttgaatgaacaagcgaattaatgagtgaatgaaattactagaactgacttaggccaggaatttctcatcttttagcagctacttcccattttatacatccaagatcatatccgtgaaaccacagtgagtctttagacaaattacagagaggcagaaatgggatggcaacatcaacttggagaacctctggatcagccataggctctacatggatcttctggtctcgctgtcatggaggattgagtcatattttcaaggctgtcctcttgagaccactgctcagaggtgccagtcaaaggtctcagggtcataggcagagggggaaggccagataggccactgtggctctgagtatagagggataaggctaaagtagaggttctcataatccagaaatcgtctctgatgctggaagtcttcagctgcactaagagatgtggttgtaaagggactccagcaacagaaagcatagccatcctcacctcttgagaatgagctttgttttgcttatgttattttacttttcatctatatatctgcgtgcttatgaacatcctgtaatatggcaccaagtattaaacatttatggagcaactgaaatattcaggatagaatgtttaaattagcgctggtctctgccttccttcctgcctgtgtgtttctctgttttgtaccctagcccattccggcaacgactatagagcatcacacttatcagatgatgtcataccgtgcccggatgaaagctagttctcaaggcactcagatcatggcacaaaacaaagaggaaagatgtgtctttaagtcattcatttagcactataactgcattttcagagggaacttctatccatgtttattctcaagattgaaggactcagtgcagctctcgtggtgacagattggctcttcttgtgtgttttttctcttgctgtttagacgtaaggaccccttttctcccacctcaacatggctacatgtttgttatttcatgataatttttaaaaaaatcataagtgaaccttcacactgttagaattatttaattgtaagtgaatatcttattagaattatttttacctgcaagactactcttttatgtaacaactgtctaatgacaaaagtggtaattatatactttgctacctacaaatgataggaaaacagagtaagctatttctggggccctctctgccactcattctgtgaggcctccatcacatcacctgacccctcacatccacagctttcctaatctttaacatgaacaggttgaagttgaggatccctaatttcccttccagatccactgttctgtgattctaggtatgtgtaacccagctatttaaaaaaaaagaaagaaagaaagaaagaaagaaagaaagctaaatgttggtagagagtatcacaaaaaaataacaaagatacactttaaaaaattggtcaagctgcaatccttagaggcaatattcctggttttgagtttataaactacctgctggtaaaatctcttcagtagtttctacacatttgcattcttccttcgttttcaaaacactgtctcggtgactgcaaagtgattcccctgatgtataatctcttattcggcgtagcaccctgggaggatgcgagatccacgtggagaagttaagcacacacagatctgcaaggtcagaagtacattaaatggcacgctgtggtccaagactttcatctttaagcatcagtaattgccatgaatactcaaggaggtgccctgtgtgagagctgctggatttgagccataagccatagttcaggaatatgaatcttgtgaaagccaaagtagtaatattgtcagagacacacaggtaaggccatgaatgaataaactggacatcgtgacattccagctgaaaaaagagcaatttattaagtttcagcaccatagatgaaggaaactggtaaatttactggatgtattttaggaacttaaaaattgatgatgaaacaggaaagagaccccagctaaaagaaaacttctggcacaaacaattcaaagcacccagttaaatagatcttctgacccattggatacccaccaagaacaaggcaatttgggcacatccaaagtggtttgtgtgggtagtcgttaaaacctgagtattacttcaattatctgagacctaacggagggcagttattctaaatagtcaggctaccaccctctagatgcaactgttttttttaagtttgaaaacggaaatatttaaaataatatactacatatagttacatagaactattttcatataaaaataatatttttctgataattttggaagaattagaaaaacacagagctcgcaaatggatcatctcactatccagagataacttttattaatcttttgatgtatttccttccagtccccccatattttaaacttattatatattcatttgtggacatatttttaaaatcagatatgccagtctagcccttttttttttttttttttttttttttttaatctggagctgccgttagggacagctgaggaagtgcagagcaatgccacaaaatgtctcccctccctttttttctccacagcccagatggctaagatttgtggtgggtgggcaggcgcacccgcccccaacccccgaagtcacatgtactcttggtggctttggcacttcctgaccttgcgtgtatgtttgctgctggaatccttcacactcttgccaatgcggctataaaaatctaggtggctgagtttttgcttatctgaattacaggaaagttgatgatgaaagagggaaatattaatgatgggttttgttctctaaattcctttgtaaagaaaggatgtgatttgttctattcttccactcacataacttgttaaaataatgggaaagccaggaaaaaagtgtttggagaatgatggtgaatacttttgggttagttgggctcaggtgacatgcttgttttctgggggaaggttctcaatactaagagattacttccaggtggcaacccaatgtagaaaaatcagcgtgtgctctggaatcagacaaacccagatctgaattctggtttttcttccctcttttgtgtcatcttaagcaagttacttagtttccgtgagcatcagtttcttcatctatgtactacaagtgatggatgcatacttctcaaatgtttagggagcttaaatggaaatatacttggagttcctagcacacagtaggtgcttactcgtgagcttgttccttctgcatttcccagctgtttctggaaagtgtgctgtcatcagcaagtgagtgaataataattgtatgctaatatttacccacacaaatacttcgcgcaaaactattcgtataatgttaatcagtgaaaaaggttctcatcatgtattatgagttgaattttctttcccgtctattaacaaactttgaatgggaaagctactgaattgaattttttttctctctctctctctgctatactgtggggacatgcttttatatttgcaaataaagctcacatatatctttttattacattctcaccatcccaccagaattttaatgagtaggagcggtgagtggagattgagattcaggggccacttgtgtttgagctgacaagatatacacatttggggaaacagaacatgatctgaattaactgggaagcacatgtttcataagtgcttgatatattcctgaaagaaaattaaaaagtaaatatttttgcttgttgcagccattctaaagagtgtgctatcagctttctttttgtttgtttgtttgttttttaactctgcttatcaacatgtaaggtgagggactagtagactttgtattataatgcttgaaaagaaaagctttatttaaatatcaaatatgaacatgtaacaagagattgcttaacaactgtgtagaataggaaaaagaattggaaaattttcatacaaaaagtaaaagaaattgaggggagggaaacaaatgaatccaaactcttattttcttttctctgttaactttcaggaaggccaaaatgagatttaatgtactgtatgaagtatcttgtagctttgctgttttgttcatttgcttacccttttatctctcttaaattttaatttctaaatctatagccctacattcattaattgatttggttatcaaacatcttttctgtgctagttttaggagaaagaaaaatttcccctaaaattgtaaattttgatttacaattgtgactgtaaatctcataatcttggtgggttgcaatcctgtaaacaaaaatgatggctcagcagctctataagaggctgcattagattcagtatgagcccagtcccactgtttgtggagggagaagatgcagtccagacaagtccatagcttcaactgtgagtcatatagtttgccaggcagagagctatgggaggtattaccaaagaggcagtagcatgtgtcttttatcatggatcatttcaattttttaaaaaagtaggtatgttataaataataatgaaaaatgagtaaagaagtaaaggtggtaactaacatgggaagaagttaagtaataggtaaggaagtgtgtgattaagagctccagtgagtggctgtgatgatgggatttcagaaaaaggatttctttgcaaaagcagagaggaagaatagcagatggtgaatgagataaagtttttctccccaagaggacaactaggaagcaaaaatccagagaaaggaaaagtctgggctactggtgaaagctggacttcaagaaaaatagtttaaggatgtttaagttttttagtttttagacacccagctgcttgtgtgacaccacattgcaaagttattatttagtaatattttgaatgaaaggtctctcttcataaaacccccaccctttacaaactattagtctcagaaaccctttacattcttaaaagttactgaggacttcaagaagcttttgtttatgttagttatatctaccaatgtttattgtaagatcagtaattgggagtttattaaatataatgaagcatttttttaaactttgattttggttcaggggtgcacgtgcaagtttgttctacagataaattgcatgcttcaggggtttggtgtacatattatttgttcacccagatggtaagcatagtacatgatagatagttgtttgatcctcaccctcctcccatcctccactttccagtaggccctgttgtctgttgttcccttctttgtgtccaggtgtactcaatgtttagctctcacttattaagtgagaatatacagtatttggctgtcttttcctgtgttattttacttgggatgatgacctccagctccatccatgttgctgcaaaagacatggtctcattctttctcatggatgcatagtattccatggtgtatatgtaccacattttttttttccagtctaccaatgatgggcatttaggttgattccatgtttctgttactgtgaatagtgctacagtgatcataacatgtgcatgtgtctttatggtagaatgatttatattcctttgggtatatatgctgtaatgggattgctggttcaaaatggtagttctgtttttaagtgctttgagaaatcaccgaactgctttccatagtggcaaaatgaatttacatttccaccagcagtgtataagcattcccttttctttacagccttgtcagcatctgttgttttttgactttttaataaccattctaactggtgtgagatggtatttcattgtggttttggtttgcatttctctaatgattagtgatgttgagcattttttcatatgcttgttggatgcatgtatgtcttcttttgaaaagtgttcatgtcctttgcccacttttaagtggtggtgtttgttttttgcttgttcaattaagctccctatggagtctggatattaggcctttgtgagatgcatagtttgcaaatattttgtcccattccataagttgtttgctttcttgaaagtttcttctgctgtgcagaagctctttgatttaattaggtcctatttgttaatttttggttttgtttgaattgcttttggcatctttgtcataaaatctttgccagggcctatgtctagaatggtatttcctgggttttcttcaaggatttttatagttttaagttttacattgaaatttttgatgcatttttgagttgatttttgtgtgtggtgtaaggaaggggtgcaggatggctaaccagttatctcagcaccatttattgtatagggaatcctttccccattgcttgtttttgtcagcttcgtcaaagatcaggtggttgtaggcgtgtgtctttatttctgggttctctgttctgtttcattcatctatatgtctgtttttgtactagtaccatgctgttttggttactatagcactgtagtatagtttgaagtctggtaatgtgatgcttcttgcttgcttctttttcctaggattgttttcactactcaggctcttttttggttccatatgaattttataatagttttttctaattctgtgaataatgtcattggtagttcaatagaaatagcatttaatctgtaaattgcttgggataggatggccaatttaacaatatcgattcttccagtgatagatttttcaagtacaagaatatataaacatttcattagctgcagagtgataacgtcatctcgtggcacatagcctctggaaaatttcactgtacaattgtgaagaatgagaatgaaaaagtcttataacattatagtattattataaagatgtcttgacctcatggacccctgaaagggtctcagagatcctcagaggtccccaaaccactttgagaaccatcccagaccattgacaggagatgtttatactcaagatttgggatgattgtgctgattctttcatttagtcaactgtcagttctttttccaggataaataggcttatacgcagttttgaaaatgaaggctgaatttcacaaatcacttgtggtctggaattggtactactagtggtaaaaaagtaagaaaactcaaaacaacaaagaacgaaattcaatagtttctaatctttcagtaactattttgcacagattaggttagacttctgagtcaaatgaatgaagagaatgcatattaatcatatatcacaaggaacttcttgaccccttagagtaagtgaacatggaatgtgtgtgcagtttctaaacatggaaatatgtaagaagaggccttcccttgaagtcctggttgacatggatgaggctggatgcagggtttctatttgatgatcctgagcctggcatgactttcagcttttgagattctgcccagagtggtagcacagaatggcaatttttgccaccaccagcctgtttttactactctctcacctcaccaccacccataaaatttaatagaaaagaaataaatagaaaataggttttggaaacgtatgtgaaggacgatttggtattagggctgagtgtttttagactagctacctttttactatcaacctctggccgtggccatgaatttctcggtctaaatcttttttctgaagatgcacagtagacaagcctccctaaaacatgaagcatgctgttgactttgttcccggggcttgtgtctgccaagtctgactagtcagttcccatcgctgctggctgaggtttttcccatcaccacggcagcagaacacacttgccttctctctttagatggtttgttattttaagaaaagccgagcatggaatcgctgggaatcattgctgcttctgaccacagagaacacgttttccctactggttgtttttcttttcagcttcctggggctttagtggtatttacatttaggccctgtcattttgctttttcatgaaagcccatttgaatgaggcacttggaatccaaatataattttgttgttgttgttcaaaaggaatccaaacgtttaagagtctcaccattggtcactgaaatggaaagattaaaaaatttcatttgcttagtttttcttctttaaatttggtaaaagtcattttgcatgccctgagaagcgcagctggcatctataacctgccttcctactttataaaatgtaattttgtactccccactttcagatctgtgatgcaaagttggtgaaagagtcccgaatgaatatccatatgaaatattttctttttctttaatttaaattttaacttttactttagcttcaggggtacacgtgcaggtttgttacataggtaaactcatggtttgggggtttgtgtacagattgtttaatgacttgagtaactgagcatagtacctgacagattttttttctgaacttctccctcctcctaacctcctccctcaagtaggccctaatgtgtgttgttcccctctttccatctatgtgttctcattatttagctcccacttataagtgagaacatgtggtattttgtttcctgttcctgtgttagtttcctaaggaaatggcctccggttccatccacgttcctgccaaggacatgatctagttcttttttatggcttcatagtattccatggtatatatgtactacattttatttatccactctgtcattgatgggcaattagtgatttcatgtctttgctattgtgaatactgctgcagtgaacatatgcatgcatgtgtctttatggtagaataatttatattcatttggatatatacccagtagtgggattgctgggtcgaaatggtagttctgttttaggttcttcgagtaatctccacattgctttccacaatggctgaactaatttacattcacaccagcagtgtataagcgttgccttttccatgcaacctcaccagcatctgttaattttttactttttaacagtagccattctgactggtgtgtgattgtatctcattgtagttttgatttgcatttctctaattgttagtgatattgagcgttttttcatatatttgctggccacatgtatatcttcttttgaaaagtgtcttttcatgtcctttgcccactttttaatgggattgtttgtgttttgcttgtacatttgtttaagttccttgtggattctggatattagacttcgttagatgtatagttcagaaatattttctcccatcctgtaggttttctgttcactctgctgatagtttcttttgctatgcagaagctctttaatttaattaggtcccatttgtcaagttttgcttttgttgcaattgcttttggcccagatgaaatattttctttaatgggaaaagagtgtttcaggtcctcaaatgttcctgcactcattgtagccttttcctcagtggtctggttgaagaaaatgaaagaaacaaataatatgtgctatgtactggccgcattaaagtcaggttatgctttagctctctaagtgactagtgctgttaatctagtgtttattagcactgttttcaggcacccttctcacttaaagcttgtctgtggccccattttctttactttttcctttttttttttccctgtggcagagattttcaatttcttttttttttttttttaattatactttaagttttagggtacatgtacacaacgtgcaggtttgttacatatgtatccatgtgccatgttggtgtgctgcacccattaacttgtcgtttagcattaggtatatctcccaatgctatccttccccactccccccaccccacaacggtccccggtgtgtgatgttccccttcctgtgtccatgtgttctcattgttcaattcccacctgagtgagaacatgtggtgtttggttttttgtccttgtgatagtttgctgagaatgatggtttccagcttcatccatgtccctacaaaggacatgaactcatcattttttatggctgcatagtattccatggtgtatatgtgccacattttcttaatccagtctatcatggttggacatttgggttggttccaagtctttgctattgtgaatagtgccgcaataaacatacgtatgcatgtgtctttaaagcagcatgatttataatcctttgggtatatacccagtaatggggtggctgggtcaaatggtatttctagttctagatccctgaggaatcgccacactgacttccacaatggttgaactagtttacagtcccaccaacagtgtaaaagtgttcctatttctccacatcctctccaggacctgttgtttcctgactttttaatgatcgccattctaactggtgtgagatggtatctcattgtggttttgatttgcatttctctgatggaatggccccattttcccccatcaccatggctcctcctctgctttccttgtggggctttcacattcttggcacctgctgacctagcagcaggcatttttctgccacttgtcaactctcatctgactgtggccaccttgtttccctgcagacatccatatgtactcttctggtctctctttttacataattcctctcacctctgttccttcacatattcctcccacccccacctcctctcatggttcaactcaggtcacccttcctcccccgggccttcttcagtggaagtgaatccatgttggctgtcttgttcttcagcgcctctgcacatatccagtctacactctataaaggttccttgcctcggactatctcacctgactcacagtcataatataggtcctggtgttgccttcctctgaggataggaccataggctagcaatgatatttttcttaacaccaccagaaaacaggtggagtcagggggctatgtatagagtgtttactcatacctagtagcttttgaagagttgatcctagaagaatagtgaaatatacatgtttgacagattggagatgcaaaggaaaaaagtctgagttgagccttgggatgctcagttctaaggtttttatgtgaaggccatgccataaaatgccccaaattcttgatggaagggcaagcatttagtaatataattggaatgtgttgaagtgttacatattctatatgcatatgtttacatatataataattttctgtatttagtgaaacaaggatgtgtgatgggctgtcaaaagatgttttttacttatgttaatcagttctacaccagtgtcagatactttgatacctgaaatatgtgtttcaaaatttcaaataaaatttatgacatgaagatatcatagattattaattgaaatcatgctaatgtcatatattaggccatttagagtctggaatttggggaaggatggaaatgaatattcagattctctgaagcatagaaagaggcagggctgactgtctccaacttaaatttttttttcctagtagtaactgtctatttactttacactataattgaacaataaaaggtaagtgaagagttgttttgattctgtttaagtttaggaggaatattattttttacgtgtgtgataaaaactttattttgcttgactttataaatgttgggtaagttggtgttagcttcactggctttgttataagcaattttgttattatataaagtaattactgacaacctataaagaaaaaataagcacattataatctgaatctgattttgcattgcgtagacacaactggaaagactgtttatgataaggaaaccagatgatttgagcaagagagacttgggctggatgtggagcagatggtggaggagatggagaccctcaaatggaaatagctctatatttcctgcaggtgcaaagggctttataaaagggcaatgagagagggtagaaggttagaccttgagttctcattcttttataaacatttaacaccttctgatttttctctttagatactaaaacattatttacaaagaattaatgactttcctttaaaacatataatgaattcattcataggacttctgccagaatttaaggcctatgctctggactattcagcaaagaattcataattcaaaagaaaattttaaagtctaatgttcgggttcccattggagccaaggtttggttatggaccaatgcaaggatacaggtacacttacccacattgacccaaagatgcactgacattgcccctgaagttgattactgagcacttcatagtatttgagttgtagattttgtgctattttactttggtctatataacaagtgagaagttatccactttctgaagcatatttattctaagtctatagatacactaaacagacaaatctctttgagtgtggcagttgaagtgtcttgatccattccaaactaggaatgcacctcctggactgtcctgtcattaagatgaggcctgacccctatcagagacaggcttgtgaggccaagaacacaggcttcatccaagtggccccttagcattgccattttccatgacccacaactgtaacccaagctcagtcagctgctgtttttcacccccactcccctccaccccttttaaaatagaacatttcaaattaagcagaagaattgtgagagtaatacaatgtacactggtaggctttgcatctaaatttgacaatgtgaacatttcgccaatttattgttttgtgtctcctcccatacgtatgtatatgtatgtgtatacacaaattttttcccctgaaccatttgaaagtaagttgcagacatcatgctatttcaccccaatgtacttcagcattatcactttagaacaagaacatgtcacagtaccattaaataccaaggaatttgacaccaatacaatatgccatttaaacacagtcccttctaagatttctccattagttcaaatgattactgtatagctgcttcttttgatccaggatcatgcattgcctttagttgttctgtctctctttagtcttcttcagtatagaagagttccctacatttatgtcttatctaataatgcagtgcagtgttgaaaagtccaggctaaggctggatgtggtggctcacgcctgtaatcccagcactttgggaggctgaggcaggcggatcacttgaagtcaggagtttgagaccagcctggtcaatatggtgaaaccccatctctactaaaaatacaaaaattggccaggcatggcggtgtatacatgtagtcccagctactcgggaggctgaggcagcagaatcgcttgaacccaggaggtggaggttgcagtgagcagagattgtgccactgcactctagcctagatgacagagctgagactccatctcaaaaaaaaaaaaaaaaagtccagctagttgtttgatacagtgttctacattctgtatctgtctgcttgctttctcacagttagaacacagttagattccagttaattactattgccagagcaccatgtaggcaatgcttatccttcttgttgcatcacatcaggagtcacataatgtttgctcctcccattcttggtggtactaaattgaaatccttggttaaactggtacccactagatttctccattgcagagatttctcctttgcttttttgtaattagtaagtaatccatggggtaatattttgaggaccctgtgactctcccgatccaaacctttacccaaagtttttgacatccatccattgagaattcttgcctgaatcatttttattttgatggttgctgaagaccagagccttttaattgaacactaattgttactgcaggaaccaggaaagagtggaaacggagcttcaaggcagaaaccgcatcaaggaaccaattgaacagacatgtgtcctattcatctttgtgccctttctgcctaacatcatgcctggcacaaaggaaggtctagaaaaacattgtggttgagaaaatcataaaaagaacagtacttgacgatttctttttaatgaggtctaacagtatctgcttagaacattaggatatttccctcggaatatgatggatatttgaatatttcatcaatatgcactgtgagttttatcagcatgcagcatttcttctgtcaccatcatttatattgaaagcacagatttttttttcactcacaattctctgcccagaatcatctttaaaacagcatatttgtaggtcttataaggaaaggatgttctcctttccagaaataatgtcagatgcatacatttttccctttctctttctgagaaaatttcttccttacaaccttcaagatatgtcatgatgattctcactctcagtaggatatctgtaaacttgcaagaagcaaaaccatactcctgttcttcctggccccatagggcatgaccgtgctgtgtgagtgccaacagagaatgctgctgtggttgcaccattttcataggtacataggtttgccagccataaagttacttataaatgtgctcatatctaaagactcatcacccagcgtgtatttttctggacctcactcccaagtcagaaacattacccgtcttagagaactttgagtttgcatctaaagatggaactccatttatctttgtgagacttctttctcacacaattcctgatgtttagtagtttgtaaatgcatttgtgtaccattcgtgtttattaatattcaggaaatttagtgttagcattcctgttggttatttaatttgaaagatatcattcatccctgtgataggtgtttctggttccctggaatagcagaagtatgaaatgccataaattgtctccttgtacgttaggtgttgactttctctcatgggttcttccaaagcctgtggctaccactcagcacacttaagactctgtcaagaagaggtgctaccaaatatcttcaatagggcctggattgttggagcctcctaacaactcagtttgtaaacttgatgctagctttattaaaatatggaggaagctgaagcagtgggaaacctatctgacttgtttttttctccaacttcaaatcagaaagctatagtcctggttggccccattttgttctttcaggcaaaagaaagatatcccatcagaaaaccatctaagctgaggctgagcaacaaatagttatcataaaagtcacctttcattgtatcaagtagttaagcaatgcccaagctgcagtgtggtcactgatagggcagctaccatgttggctctccacacttccatagatccgtctggcaaggcaacaacaagcccaaatgaattcagagctttgttacttacacagacagcaaaatcaagatcagtatgccatcagctccttgcctccctagtcccacacacaggatgacaccaaactggagaggccagaagacaggtggcatgacaggtgggtcactttgccctagaggagccacctctaaattacagccaagtagttttattggcacagaagcctgcggctgtgccctaaggggaagggggtttgcaagatgcaaagtcctgtacacaaccaaaacaaggaagatggatgggaaaggtcttgtgcagtctcccacaaaatctggaggtagatgagaaaccgcctcacaggagctccccacaaggctgcttgtcttccttcatttcaggaggaatttcagggcatcccaccaagacttcggtcagactgtggctaagctttgcctctatggcctataaggggatgtgcaaggtcaccatggtgccatgatggagccattccttgcatattgcccttctcatctatcagcatgggaagaagtttgcagaaatgaagcatccagagttttgtgaagctggttaggtgaaaaattaaggcttttagaccttacacattatttttttcaggataggatagatgtgctgcaggaacagataatccaatttctggtggctttacacacaaaggtttgtattttgtttattgtacatatccagcaagagttggtagtagtgttgtattccacacagtcattcagggacccaggcccatggcagcagtttcactatcctatagccacaacatctgcaactcatgtccccctcagttcaccatgataagaaaggacacagccagaagatcatgtgccagctcttttacactttggcctaaaagggacacaaatcacttctggccacaagttactggtcagaactatatcacgtgatctgacataactgcaaggggctggaacatgcgagggaacagagggaatatttaataagcatttttgtttctgccacagacatatatttccccaaagtcaaactatcagtctggctaagtatttttacaagtgaatattcgcaaaaaaagttccatttgttaatgcttaacattttacaaactgctttcactgtaattgcccttagaaaaaggtttgggggaaggggcatacctaaggctaagaccatgaatgacagtgttcctgacctcagaaactacagttgctccatgtacagtacttagatagaaaccaacacacactttagcctgtactgattttggtggggactcaaaggatcattttgtacttgttcatattgaatggaaaccaagtggtgtttggaacaccatcctaaatcatcagaggcactgtgctattctagaagcagtttgcatctactattccaaccccagatctatattgtaaggaactaaatccctttcttggaggaaatgaaatggtgttagtattgcaggtgcagattttactctccacataagtcaaagtagagatttaattgccactctttagaagtgcaaaacaagagaatgtaataattagaactgtcattatatactttttctttctctgatgttgatattaactggttttaaatagtttctaacctttactttgatataattattaaatttttaacataaaactcaaatttcattttttacacttaaaatgctttaacagatccatgttaagttagctgatgaagatatgtgaaagaagtaataaaattatattgtttaatttttctcaaagacatagaggaaaactgtctccaaattttatatgacctatcagtgataaaagagacatcaatattttgttgggatataattaaaaactgataatttgggggaaaacttttaaacagcctttccccaatctgtacaattttgacgttatcatgtgcagccctgacaggagttgccaataaagttagttttattaatatcacttgagggaaaccagcagtttctattggcacagtctgagctccagcaggaagtcatctctttttctcagtgcattacttacatgtgaaagttggggtgggggtgcaaaagaaagtatatattgagcccaacatatcgccttatttgtctcccctctctatgggcatggcatctgtgttttgaagagtcaatgggggagaaaacagttgtgttagtgcttgaaataggatgcagtacattccctctcttcttgtcttctcttccttccgcccccggtctttccccttttggaaaggggagttatcgagagactgagatctcagagccaacactgaaaacgacaccaaattatagctgtgtccagatacctaggatcttgactggccttatcataagaggcaaggactgcggtaaactgcacatcagggaatttgatttcttggtaggtttaaacagctgaaggtagaaggaaaaaaaattaagttcttcctgttatattattaacttatgagaacagcgaaatctaaaagaaattgttctgcatagttgaaagtaaagatagaatactcaatatattttctacaattcatctctgatagaggagaaagttgttttgtgagggaaagccttggggaattacttgtgttctagataaaagtgtcatttaagaatttattatggaaaatttcaaacaatcaagagagtggatagaatgaactgacttgtaccttacttatcttcaataattatcaatattttgcccatcttatttcagtaactctaccaccaccccttttattttttgaatgaagaattttaaagcaagtcctaaacatcctgtgaggtaacttgctccaaatctcataatgagaaggtggtgaatcaggattgaaaccttggcagtctggctccagaacccacagtccatggaaagaggacaagtcagctgtgaagatcgcttaaatggatttgttcttaaaatcaatgtaactaacaagcaagcagacattatctggggaacctccactccaaactgtctttgaatctaggggttccatttttaaaaagggtgtgttggggggaagggtaggttcaggatttagtatcaggtgccctttttactagagtagcattttatgggtgtactcatgaaacaccagttaatttgccttggctgcctctctccaaaacatatttatagaaattaatatctacccaggcacttctgccaacagttcaggaatttaaaatagtgggggtcaagcacaggtcgtggctgagagaaggctggaagtccatgagttctactgtgatctgacaaaatatgaggagttgactctttaattatagcattttgggagtaactaaaggtttgacacatactgttctacattgtttaaaaatatactgtttttagagtacatagaacagaacttaaatgactgctaatacctcagtgacactgaatcaatcatttgaattcagttacatgtcctgagccaaagcctagtactcgaccttgcattaggccctctgtgatctgtgggcgtcaaagaaagatcctgggaggggcatgtcctgcttttaaagagctggcactctctcttgggtgaggggtggccacggaggaacaggccagatattcaagaagtggggttggtggagttgccccccagccagatggggctacctccctggtctgtggtggccacacattgctaggacacactcaaaacaataccgtggcctccaggcagccacagtgtaaaatgttcttaatttccctggagagaaggaagaaagagctttcaattaacatgaacactggctactttttcaagttacctaattgaactgtcagaaagcaaagactttgtggagagggtgagaggcaggattggtaaattgtgattacaaagctgctgggaaagaaagggcagttgggggacaggagatgtgacagcttggagctgcagtgggcaccccagattcccgtggtggaggtctactgaaatggatagaacactttggaggactgcctgtcagtctctgcatttcttggggaggggcctgaccatgggatctggaaggcaggcaggaaggagagatgctaatatcttaagtcatccttataaaacaaagagaattttctgagaaatgatggttccttcttctcctctgctttgaagaaacataacctagtgcatagttccccaaatcttagggcagttacctaaactttatgctcatggaaacccaaaacactttttctcctaggtcagacccatttcctggcctgcttcacagtgaagtgtggccatagactcagttttatccagtaatatgtgaacagaaggatatatatctcttctaagcctggcccatcaaactgcccacactgtctgctattctttttttttcctctctctctctctctctctcttccctggccagacctattcaaagtgatcttgagatctctgttgaagatggcagagactttgtcatccttaatctctgaatgaacacatggataactaccacaaactagaaacacccaagtagcgttattggcattttcatgagtaagaaattctgtatgtaagctactgagatttgggatggggatacatctgttatagcaattagaactatttactacaatctttccccattcttatctgtatatgacttatactgtcattcattattattattattattattgagatggagtttccttcttgtggcccaggctagagtgcaatggcgcaatcctggctcactgcaacctccgtttcccgggttcaagtgattctcctgcctcagcctcctgagtagttgggattacagatgctcaccaccacgcctggctaatttatgtatttttagtagagatggggtttcaccgtgtaggccaggcttgtctcaaactcctggcctcaagagatccacccacctcagcttcccaaagtgctgggattacaggtgtgagccaccgcgactggcctactattattatttggagacagagtctcactctgtcacccaggctgcagtgcagtggcatgatcatagctcactgcagccttgatgtcctcagctcaggtgatcctcttgcctcagcctcctgaagtatctaggattacaggcatatgccatcatgcctggctagttttttttgttttgttttatttgttgttgtttgtttgtttgttttgagacagagtctcactctgttacccaggctggagtgcagtggcgccatctcggctcactgcaacctccacctccctggttcaagcaattctcctgcctcagcctcctgagtagctgggattacaggtgcttgccaccacacccagctaatttttttttgtatttttagtagagacagggtttcaccatgttggccagactggtcttgaactcctgacctcaggcaatccgcctgcctcagccttccaaagtgttgggattacaggcttgagccactgcgcccagccggccagttttatattttttattttttgtagagatgagctcttgctgtgttgctcaggctggtctggaagtcttggtctcaagcaatcttcccacattgatctcctaaagtgctaggattacaggtgtgagccactgcacctggcctattatttttctttaaatcaagttattttttatgaattttgattttaaaaagtaaactttatgtcattatcacaaataaaaaacaatatcactacaaatagaaggtaactctaaaaatacattgagtggaaaaaaaatgttattcatttctagctagatgctatttcctggagaaagttctttgcatgagacctgttgtctctgtgttgaaaaggggaaactagccactattagaaaggtgtcaaagacatattaccacaaaactgagatgcattgcttggcagaatcagaagagttgaaaaaaattgaaaataatttccccatagttatgtgattccatgctatttaatgttctgtctcagtcaccttaagtcatctggtttaccagtggtgcacatcctacccttgggagtgaagacttactaaatggagaccaggtttggctggaggcttgaggatgagctgaaatgcataatagaagatacattgtgaatcttgtaggcgtggagtaaaatgagacttctgcaggcacaggaagactagccaacctatagttcatcatttcaagtttgattcttgatatatagataaaagatttttttgttaatcaggatatttgtggtttcctcctctagtgtgttggaataagctttgaacacactaacctttccacagataacaataaacttgggacaaaatgcaaaaaagcaactacttgaaggtttttgaaagtgaaaaaagtaggcaaacaggttttgtaaagcagtgggcacctggaaaaaaggactttagtggggtgagttgtctgtttttgcagaatgacacagggcagccgaagttgtgattaaaaactcctcactttcttgtctgagtggcaagaagaaagagtctagggagcctgtggccattggcgagtgagaggggaaaaccagaaaggagagagtcagacaaggagagcccaagattgtgagtataaactctgcccaagtctctggctgattcttttttttttttttttttttgagatggagtcttgctctgttgcccaggctggagtgcagtggcatgatcttggctcactgcaagctccgcttcccgggttcacatcattctcctgcctcagcctcccgagtagctgggactacaggctcccgccaccacgcccagctaattttttgtgtttttagtagagacagggtttcaccatgttagccaggatggtcttgagctcctgacctcatgttccgcccgcctgggcctcccaaagtgctgggattacaggcgtgagtctggctgattcttgagccatacatgtgttggacaaaatcaaagcagcacagttaatggtaacagagctggactgagatttgatctgttgcctcctgcacacaagacagggtttgcagtttaacaaaactaattgcttgttaaaataaacattaacactgttcaaaggaaaataatagaatccagagtctccacaacaatattcataatgtttaggatacaatccaaagttactttagctacaaagaacctggaaaatgtgacccattctcaagggaaaatggatagaagccaaccttgagatgatccagatattgaaattattagaaaatgattctaaagcaactcttataattgagataaaggaaaatattcttgtacacataagtgaaaatatagggaatttcagcaggaaaatataaaatataaaaagggacaaaagggaaatcttagatctaaaaataatatctgaaatttaaaaaatcctctgtatgggtttgattaatagcacagtagaagtaatgaggaaagattcagtaaacctgaagataaatgagtagaaaggatccttgatgaataacggagataaaggattttaaaaagtgaacaggatcctagacctgtgggacagaatgaaagcctagtatgtgtttaaggtttcagaaggaaaggagaaagagtggaacagaaaaaatattgatgagataatgaccaaatttttccaaattgaatgagaaacacaaatttacaaatgcagaaagctcagtgaaacccagataagataaatacaaaaatgtcacaccaaagcatatcatagtcaaattgctaaaaattaaagagaaaatcttgaaagcagtcagaggagaatggcacacaacatagaaggtaactgatttaaatgatcatggacacgcatctggagctatgaaggccagcagagagtttaacagtatctttaaagttctagaaggtttgggggaatgcaatcctgtcgaacaagaaatctgtatccaatgaaaatgtcctttgagaatagaggcaaaaatatttttaaataaaaagaaatataagaaaactcactatcagcagatctgcactacaagaaatgctaaagaaaatttttaagctgtagggaaataatatgagagggaagcctggctatttcaaggagtaatgtagaacatcagaaatggcagatatctgtgtaaataaaaaatattttgttgcctctcaatttatttacaatgcatatgattaatagcaaaaactataacattatcttatgggatttattatgtacatagctgtaatgcatatgacagccatagcataaagtacagtactatggcggtgggaggatgtgttaatggaatatatggttaaggtttgcacgttttctgtgaagtggtgcagtatgaactctaagtagattgtgaaaagttaaggatatatatcctctaaaacaacactaaaaaaataatgctaaaagccatagctaaaaagacaatgggtaagttgaaatggaattctaaaaaaaaataggtggagtgtttatggtatgggtaaactaacatactaagatcgttgatcattttggtgctatgggcttgtcatggaattcatcatatctgatttatgcttccttccttcctacttatctggctgttttcattgaactgactcgttccataaagtctgttataatttgccacacttgttttcttatctccataaatatgtgagcttcatgcttatagtgctgtacattcagtcattatggtgatgaggatttggaagtttcagatggagagaaaaatacttaatacctatcttctgcagagattgtcttttcttaaagataagattctggcaaattacaaagatgactgtgggaggcttaaaagtagcccatgatatgttagtagcaggtacatggaatctaatgttcagcatatttgatttttcttaataaaattcattttgacatataataataattgccatttctcacatatctattgtgtgccaggcactctactgagaccttaacatgtgatatgtcatttaatactcaaaatagagtcaatgagaaaaaattatttccctatttgcagatggtaagtaatttgtcttagatcaaataaccctctctgtagttaatgatggtggtaggattcaaatctgggttggcttggatttgaacctcttcccatatgtcacacttcttcctgttagatgtttaccaaatttaaatgttgacatctgctttgtcatcatcattcaaccataggtatttttgagcacctgggaataataagttgcaggaagatgcatgatcgactgttgatggttagagtagtacgtgccttctcaagagcccaaagtgctacaagctgtttttcccatcctcttctacttctatcctaaaaacattacctaccctactaaaatctagtaccattcatcaaaattattcgttttttccactgtgcagaggaataaactgaggcccaaatgaatcgtattagaagagctaggtgggaaaccatagcctaggctcagacctaaaccgaggcctttctttacactttttttttttttttttttttgagacggagtctggccctgtcacccaggcaggagtgcagtggcgccatgtcggctcactgcaacctctgcctcctgggttcaagtgattctcctgcctcagcctcccgagtagctggaattacaggactgtgccaccattcctggctaattttcatatttttagtagagacggggttttgccatgttggccaggctggtctcaaactcctggcctcaagtgatctgcctgcctcagcctcccaaagtgctgggattaggcatgagccacctagctcaaccagccttctcttacactttaaatttgaatccctattctaaaaatttagtggtttaagacatgttttctgaagtgttccagaactgaactgctcctggcaaagtcaggatagtgagaggataggaatagaatctatatgagccagtcacattttttcctgtctcatctctggaatgtcatggcaggatatcagatcagtagtgacatttacaggagactgaacatttttaactggaaagatgaagagtttttaagaccttattaaaaccaaactccaatttaacttagaaccatagccttttaaaggtatgatagaatcttagagaacataattctcatattctctttttacaggttctttcaaaggccaagagaggttgaatatctactttagaggcaggacacacaattagtctttgcagaaccaggtgttctaacttccaatttgggacattcaccattttttcattcttacccccacttcatctacttcttgagctaatgagctatttgtgaagcttcccttatgcctcttgaactgcttctgctgctctcggaagtgtgcttagaatgagaacatatacattataatttaaattattggatcagttgaacaattcgtccctgcaggtcaaattcttcaattgtgatcaatccctatgagtcaaattcaaatttaattttttaaatgttttttttcaaaaagatttcatttcattctacttctccaaatagataaatgtttatttcaagaaacactgccaaatattgttagtgcttcaaatctgccagccattgacttttttttttttttttgagatggagtcttgctctgtcatccacgctggagtgcagtggtgcaatctcagctcactgcaacctccacctcccacgttcaagtaattctcctgcctcagcctctcaagtagctgggactacaggcacacaccaccacaccaggctaattttttgtatttttagtagagacggggttttaccatgttagccaggatggtcttgatctcctgaccttgtgatctgccctccccagcctcccaaaatgctgggattacaggcgtgagccaccgcactcggccagccattgacttcttgaagcagcataatttgttgtccgtggctcctgaatgttcctcatgccaccagcccttatggtggatagtacaacaccaatgtattccttggaaatctgggatcatctggaaagttcgtttctgtgggtcagacttttaattgattgttcaactgatcattccacccaaatattttctttttttttttttttaaattatactttaagttttagggtacatgtgcacattgtgcaggttagttacatatgtatacatgtgccatgctggtgcgctgcacccactaactcgtcatctagcattaggtatatctcccaatgctatccctcccccctcccccctccccaccacagtccccagagtgtgatattccccttcctgtgtccatgtgatctcattgttcaattcccacctatgagtgagaatatgtggtgtttggttttttgttcttgcaatagtttactgagaatgatggtttccaatttcatccatgtccctacaaaggacatgaactcatcattttttatggctgcatagtattccatggcgtatatgtgccacattttcttgatccagactatcattgttggacatttgggttggttccaagtctttgctattgtgaataatgccgcaataaacatacgtgtgcatgtgtctttatagcagcatcctgttttgaaatgactagcctggttctaccattcacttcaagcatcatttgaacaatttggccctttatatatcaaataaatgtaaaggaaggagttcactgactttgatgatcttaaatagttttgtcagtactgtaaatactgatctcgaataaaatactaaatgaaattcaagaccttagttgacctgctattgcactagatttgtttggaatcaaaacttatagtcttttaaagccatatcactgtaaaatagagtaaaatctccagtaaagttctagattattcataacacatagtggaaattgttaggagacttccatgccattactccaagttaaagccaacattctaagttaaagccaagtatcctgttggaatcctgttggattcaggttgtgcacagctggggtgaccttcttaaatgttcttattctagagtttgcattaaaagcaaaggaaaagctgcaaaaatagttgattagatacatctgagtccacattttagatatattgaatttgaaaagaatcaatgataaaaataggacttgacaacataactaatagttgaaaattttcttaacaatgaaaatgagaatttttgttcaattttgagggttttttttgttgtttctgtttttgttttgttttgagtttttcagttggcctatgggaagaaatatttgcagcagcatataatacccagaataatcttgaacttgccctgaggactgtagggaaaacccctacttgccttagcatgttcttggaaacaataccacaaagtgatttatgtttttctatgagaacaacattgtgaaagcagcatcttttctgaccaaagacttggcatcatataaaccatcttaccaacagtacgccataaaaacagatatgaatacaaaaagtaaaattctagcatcataaacctaagttaaagaaggtttaaattgctgtagcaattgatcattacaagaggactccctgactataacagcacacagagctcttcaaactacaacattgtgtcataaatgagattgtgtaaatagaagtaccttgcataaccctggctggtaactggtatcaggtaatgttgattgagaacaaatattaaatatctgtttgctctccaaggtgacatttctgcctctaaagttttatgtttcaatttacaatgtctacttcttgtttgtttgttttcttgagacagagtcttgctctgttgcccaagctggagtgcaggggcataatctcagttcactgcaacctctgcatcctgggttcaagtgattcttgtgcctcagcttccccagtagctgagattacaggtgtgcatcaacacacccagctaatttttgtatttttagtagagatggcgtttcaccatgttgcccaggctgtacaatatatactcttatattcttagactatgaaaaatgacttaaattgtggagaagtatgggaagaccttcttcttccagagatacctgaatagatccttccctattgaatttccatgtaacgagtcagggcattcatgaattgtcctattttcagttagttttctaagtactatagtagggactcctcagatatctgttacagtggtggatgaagaaggaggagaaggagaagtttttaaagtataatagctaacctaatcttttgtctcttccaccatctttagttaattcagatgttctccttcaatggctcatcatcagacatatacccctctcccctctctccccagcaaaggctaaccaggaaatatggaatagtatttattttgccatagggtgtactagacatctcccaagaatgctaagataggataaggctgtatcctcctgatccttcaggatgagcaggccaaaccatcaaatgatcaaattccagaatagccaatttgccccgaagtgattttggtaaagaatccatttggaatagtatttctcaactctccgactacatcagaatcaccaaggcctggggcctgccccagacactgatccagttgttctgtggcgagatggcagttaaaaaaacacacaagaactttcaagtgattgtaatatacagccagagttgagaacaattgggccagagctttcttatctgccaaataatggaaggcagaatggaggaataggggttaattttattaacatctaataaattgatttaaaatgaaaatgggtgcctcttaataataataatactgatttggtgtttatcatcttacaggcactgtacacacatgaacacatttaaactgtgccacagccttcactgtataggtgagaaaacagtcctgagtgtcaattaacttagtcataacaatatagctgctggcattaggatccagctctacttcggaaaagctcatcagtttccactctaccacaccacctctacacttttactttctcatctacgtttttctttgaggagatgcagttaaagtcaggcaagctaacatatattaccactgataacaaattcagcagcctaagtattgctgaggaatttaagtggctgatgtgtttgttccagtcttgggtagaaatgatacattatcaacaatttatttatttattaacaatttataaagaaaacagttttatcaaaaaattatcagcttgaattttatgaatgaagacagatgattcctgtccatggaaaataaatagtctgtatcctttaaataatttaaggcacatttcttgctaatattctgggtccacctatgtcttgcattgaaaaagtatttacctaatatcttaaagcagggctatgataacttagttctcaaggaaagaaggttttaaaaataattttctctgctctccatttctcttactgtaagcatgtggcaaagtcttggcatctgctcagaataaattttctgcttcctttctgtcttttagtcagcgcacgctttctctgagttctcccccttactccttccctgctttagtaatctacaggaaaccagaccttactaatttgagtgcttgctcttagaattacttattactgtattaatacatatttgctagagtttgtggaggatttgtattgctctaggtgctaataaaaatgtgtaaaagacaggccccttaaataatgtgcaattttgagggaaacaacaaaggcaaaaggatttctttgggactggctatttgcaataaattgctcatttgattttattttttattttttttttagcatgcaggaggtttattaagaaatgcaatgacggcaggattggccagagagagaagtcaagacatgatgcattctcaatggaatgcctcagctgaccatgtggggagttctaaagacggactgatgattcagagtgccccatgttgatttatcagtaatttgttttgagctgccctggaaagcgggtgtgaagttggttgagaaggccccagatttctcattttaaaatgctgcatgtgagaggacatttttcacaaagaactactaaattaaaaaattggggaatagaaccctactatgaacggagtgtgtttcttctattcaggcacatatttttgcctaatatccagatgctgtttccaaagctattttttcatgaaattgtgttgctctagaatgctcaatggttctcaaattttagtgtgcatcagaatcttaacaatgaggggctaagacacaaattcctgccctcctccctgccgcccccctccagagtttcagattcataggtctcggttgggtctgagaatttgcattcccaagcaagttaacaggtgatgctgatgtttctcaggggataacgggcaaatggtgaaacccagaaagttttgtttctagatatgagatcccattgtctttgccaatgaagctgtgctgtaactccatcttaacaagtaaccccaaattatacccacctgaaagacctttgtgggttgtggaaaacctggaagatggctgagagacagtaccctcgaagtagttctgaggagattgttctgcttgtattcccatgcagcgccatcactgcctgacttccttatgtgtgtctgatttgaggcagttctctaggaaccagttcctggtgctgcagtgccactggcagcttcccagggcttccagaaccctagtggcatggtgggaactcctgttcctcacccgacctctccacagccctggacctgtaaggtttcttccaggctacatggaattagatttccacttttccttggttcacagggggcaggagccaggttggaacggctgccaaggagactgtcttttttcagagcccttaactggcagtcagcaagaccgaactcctctgctccttggtgaatggtgatgctgattatttggaagctttagcaccaaagtttgaaattcccctaagtgaatggttttggcgatccccttcctttagttatactattggctttctctcatgttcatttaggttgccaaatcttctgtataatcctcatcccccatcaaaagagaaaaaagaaaaaagaaaaagagtagttctatttttgtggaaaaagaggaaagaatccaggaaacatttcagagaactgtatgttttcttagttccttctctccagacacgaaatccaaggagtatttggtcagttgctaacattacatgaggggcttttttttttttttaaagtaggtataaaatttaacttctctgcccacctcctgacaagaaactgtggaaaatatccagtttacacaatttgaataaaattattccttgataaaggtcacgttttcttattcataagaatcttcacaggaagatagcatggaaagggactaataggtgcccaggttccactctgattgtgcagagaatataaggcgggcccaggctgtaaggagccctcctacatcattctgctggtagaattaacagcagcaattgcccaggtctgttgtaagattaggattctgcccaccctctggagctgccaccattctgccttctctttcttagagttttgtattctaagtttttactttgaatcttgagaatagaaaatagttttcagtctcttgagattttacatagtttgtccatgagcttcagaaatgagttcagtgtaactgcttagatacctcgatttatctttttcagtttcatttgttatttttaaaatgctttaagatacgattaagaggccgggcgtggtggctcatgcctgtaatcccagcactttgggaggccgaggcaggtggatcacctaaggccaggagttcgggaccagcctggccaacatggcgaaaccccgtctttactaaaaatacaaaaaaattagctgggcgtggtgtcaggcacccataattgcagctactcaggaggctgaggcaggagaagtgcttgaacccaggagttggaggttgcagtgagctgagatcgcgccattgtactccagcctgggcaacaagagcgaaactccatctcaaaaaaaaaaaaaaaaacaaaaaaccattaagagaatctgcagatagttcctttggcagaaatgttggttaaaaaaaatcttctggctgtgcaccaagtcagtgacctataaatactctgtgctggctcttctttctcctctttgtgattcgctgggatacagatcttggactaatgccttgaagaaaatgttattttgatgataagcaaatatttcaattgattctagaattgaagacactgattgtggactggatgatttcttctagcccaaaattcattctctagattaacctcaagtctgctgtaagtgggggagaggatgccagttcacattatcacagttaccattattattattattttttggccaaaatcaaccttcatttcttagtgtacatttctatagttactaattcagtcaggctcaactgggttctctgcttcaatgctcataaggctaactcaaggcatcagccagactgggctttttttctggaagctcaagtaaaaaatccacttccaaagctcattcaaatggttgggaaaatttattgtcttgtcatcacagtttaaagattgtactctacaagggtagcaaacactatcctcgttgaccttcagggttgggactgtgtgacttgtttatatatgtgtatatttgtgtgagagagagcaaaataatgtatacttggtacggtttagtgttaactgttgggatatcagaaatataaataatacttaaagtgtactgcccattccttgtggaagaagcacctgtaagcactgtatgtacagtgtattcctttatttaatcctcacaaaagtcctatgtggtagattctattactatccccatttgtagattaagaaactgagacttaaataagataaatagcttgctcatgatttcacagctgataaatagcagcaccagaattgaactaacctctgtcttgaaaacaaagttcttatatactgtgctaccctgaggaaacttctagttgaaaaattgtggtctcatatggtcaaagcttgttgactgtgtaatgccatttctcttcctcaccaactttaaggttttttatatgagaaagggcatgggaggctgtcaccgacctttcttctcttctattacaatgctttaccttcagactgccatttttttttttgaggccaaagagaaatagaaagtaacttctatccaagcaaaacctggggaccctagatctagtccatctcaattgaaccagaatgtttcctactaatagataaaatctatttttgtttaatactatgccattccataaagacatgattattccttagcttctccaaagggatacttactgaaagtgtagctgagactgtttattcagtaggttcctaagcaccatctgctttactgagtgttctagattttgtctaggttattcctgtagagccatggtcagcattatagtaacataacagcatatatagtaacatatagtaatagagaaatatctatttttactttatcagtaataaagtattagctctgatttatggtaacaggatagtcttaaagcttatagatctgatattaagaacattttatataatgttatatatcaacattgtcttttaaagtgatggatgcttttatttcatcttttggtttatctctgaaagatcattcttttggatacagttttttttttttttaatttagagacagtttagacttcatagtgtcatgataattttcaagttggtatcaacaggaataacaaaaggaaccaagatttgaaacatctgtaaataacaataacttttattgaccaacaatatagtatgtgccaggcacagtgctaagcatgttagcacatttccttacatcacactatgagctgtaaatattgtctccacttcacagattttaaaaactgaggttcacagaggttaagtgcctgatccaaagacacataacttgtaagtggtggacccaggaagccagagcctggtacagggtattctgttgcctcttagaacccaagatttttctcacccagttcaaaaattctcatctacagtggtcagcagctgtgagaactgttgagtctcagtcaagactcacatgattatctggttcctaggcaagggttaaggccatgccaagagatgtgaagcagaaggatgtggcagattgactggtgtgatatggggtgtggtgcccatccattcatgagtgccacatagccgggagggaacgtgcgagacatagattctaattcaaaagggaacagattccagatgggaaagtacttggctaattgtattcaagttagctcacacttatagaactgtagaactgtaacatttcctgagggcaggagtggatggatctttttctttatggtgcatgaactattagtaggtatgtactgatacctgggggagtaagatagattctgaaggagtctagaaccagactacatgtgtttgaatcccagttttacctcctattagctttgtaggtttgggcaatttaaataatctctctgtaattcagttcatctcatctgcaaaatggagatgatcataatacccccatgtagggttgctgtattaagtaaatgataggtgtgaaatgcttagaacaaaggcatttgtcatcatcatcatcatcgtcattgctattgtcaaaaaatgttaagtgcacttaatagttgccttggatagagcagctcaaagccctgaccaaattatgaaccattttgagagtcattaaattagcagtattggaaatggatgccaatagccagagttggcaagggggtggctatgtggcacaatcatgtatttgcagtgggagggcaaatcggtataattcttggaagatcagttaggagagctgttatcaaatatcctaaaaaagtataagtcctttgacctaggagttctgtgtctaaaaacaatttgaccaaaagcctaaactgtctacaaggatgttaaatgaagatattaaaaatatatagaattttatgtttatggacatggaaatatttgaaaacaaagtaaatagaaaaaagcaaactataaacactttataggaggatctcattaaaaatatgtcttggtagatatcttcagatgacttttgttttagtttattttaaagctagaagtaatagattaacatcccactttcaaaatttgtttacctttaggttttttttttctttttgctagttagacatgattttgtccaataatgtctgcatataaactcttcatccaaataccaagaattaggaaatcctgctagaagacttgttctcccctaaaaagaagaattgtgtaatgcttcctcatcagcctgcctgaggtatgcaacaggctccaatcaataatagtgctcagtactgtacaatttctcactaacttggggcagtatcatttaaaaatatccccctccaccctgaaattctgatacaattctataccctctaacatctcatatccactgagaatcccagatatggaataaaagtttttgtcacaagcataagttcttttgacagtcaagtggtttctgtgcagaaagacctactgtgaactagctaatgctaagaggtatgattgtttgatattaattcttaatacataatttaggcaaagtcaccccttgtcatttgggaggatactcctgttttttaatggtttccttagcagactatcacttactttcctatttggtcttcccatgaattggatttacctccaggttatatggcaatttaaaggattgtgatgagaaagaccaaggtcatggcattcagactagtgtggctttttttggtttctttatgtttttaaattttttttatcttttttaaaaaaataagtatctataggatatctttgaatgcccagctgctgagtctttggcctagaatgctgaatacttatgttgatgttgataagcttcattctcatatccacattgagaaacaagcagaaattcattgttatgtgagcatgtaaaggctgctcttttttggacagcatgtagcaattaaaagacaagggctgggttcttactgtcatctgaaaggttaggagaattctagtctcatgacagactttttccattattgtgaaagggagagagggatcttgtgcatatacccaactggggcccacaaatccccttttacatgtcccagtcagaaaacattagacactaggtctcgaggcatgtcatgttcgtccccatcgggtgagctatatgtgcatgagagaggcagcccccaacttagaacctgttttgttgtgtttgtttgtttgagacagggacttgttctgtcacccctgctggagtgcagtggcatgatcatggctccctgcagcctctaatcctgggctcaagcgatcctgccaactcaacctcctgagttgagtagccacaggtgcacagcactgcatctggcttgactctttttaaaaagtcagcttggctatagataacattttcccagaaaattagtgtttcaaatcagagatctgtaaaccttttctataaagggccacatagtaaatattttaggttttgcagtctgtaggtctctgttgcaactactcaactctactgttgtagcagaaagcagacttacacaatatgtgaacaaatgtgtgtgactgtgttccattaaaacttcatttacaaaaacaggcactgagcagggtttagtttgctaacccctgctataaacaattattcatttcctaaaccagcccacagaaactcctctggtaagttgctgatacgttgtacatttacaatattattttctctgaaatttgttttttttttaatcaaaatagtgttaggccttgtctaaaagtaacacatttctaattaatacttcccgaacctgttccccaaaagcaactacttttttctcttttagctattctgaatgttatcttcaaatctcaatgaaataggcttttattgttgtttcttaatttattagtgtcttagtctgttttgtgctgctataacagaatgccataatttatagagaaatgagaataacttataaacaatagaagttttttggctcacagttctggagcctaggaagtttgagatctcaaggtcaaggggctctatctcataagggccttcttgctgcatcataacatggctgaaggcaccacgtgggatgagagtatgcacaagggagagaagggaagggggccacgtttatcctgtgtcacccacccctgaaataatcactttaattcattcgtgagggcagagccctcatgacctaatcatttcttaaagcttccacctctcaacagtgttgcatgggagattacatttccattgcatgaacttggaaggacacatttaaagtatagcaatctaaagcatagactttctgctaaaatagataggaatttagttttccgatatcctcacatgccaatttctccgaacacatgatataatttgttttttgtttctctactttttactgcaataaacattcatagtttaaaagtttacttcttaagtatgcatcttgatgaattttttattaccaaacagtatcttttagattccctactttgtaaaattaggctcttggcacccctgcactctccacttctttttacttttatataatacagatcatgatatttcattttattttgtaagtacatttaagtctttaagctttatcaaaaggttaattctaaaaattgaaaatcaataaatattatttgtgacctatttatagtggagctaatgatcattatagtttaattttcttgttcgtatggctgtttgtttttatggaatttccaaatgccattttcccttatgcttttgaccctttaatcacagcttccacttttgacattttccgacatccaagttcactttgatggagttttttcccagcccctcctccacaggttcctccatctttctgctccctaggcttgatgcttacctgtcactctggaagttcctccttcagatccactggttcctgaaaactatcctgtcttcatttcaggttcactccttcattttggttgtacatatcttcaatgatcttcctataaaagggtgtggaggggctaacttttcttagtctttgaatgtttaaaaatgttttgttctattttcatctttggttgatgattaggatgaatatagaattctaagatgaaaattattttcgtccagctcctttcttcagcatttgtggagtgggtgttgagaatggagtggaggggaagagtaacttctcagtaggaactacatttgtctgcagtcttcaggcttgctcttgaaaagtctaataccattctaattcctattcctttgtagagggccagtttctttattttcctctatttttttaattttttattatttatttatttatttattttgagacggagtcgcgctctgtcgcccagcttggagtgcagtggcacgatctcggctcactgcaagctccgcctcccgggttcacaccattctcctgcctcagcctcccgagtagctgggactacaggcacccaccaccacgcccggctaatttttttgtatttttagtagagacggggtttcaccatgttagccaggatggtcttgatctcctgtcctcatgatccgcccaccttggcctcccaaagtgctgggactacagattttcctctttttatatggaaacacattttatgataacttcaaattctgaaatcaagtcataattttgtgagaaattagaatcttttctgattcatccttctatttaattttaaaaataattttctattagtaagattttttctagtttacttcttccattttcatagcattctcttcttgttttatggttataatattttcttggctctcttttaaatttttgaaattcttttctattgcctgtcttatgtgtatttccttcagaactatttcctccatttattcatctcatttgtattctttcttgttggaggctttcttcatataactggtaaccatgattggctattcataattaagagtgaagccattaaacagctgccttgtgactctctatgtgggctttgttttatgatatttgaatgagttggtgtctgaatgtgctttttctctgaatcttccaatttctttttaaaagattgctccaaatttctttttgtatgtgtgtgtgtggttgggggtaggtggtgtctgggttgatggagaggaggagagggaggagaaaaaagagagattattagttggcagaatggagaggggcatagggtaggggttaatgattggttgcctcacatacatgatttcagataatttgtttttcctgcctcacagctcatgctcattctctggccttcgaagaatctcaagttttgcccagttttgcaagattaattgggtcctgcccataaatttctacactgtagattcttctgccctgtttcattaattatcacccttccattttgtctcttttagaaagaggcttatttggacctcctcaggatattatgccattttaaatttcttaactcaatttagtgaggttgattaaagaagagaagatcaagatcaacttgtgtggtcaattggtagtcacaatattgttttctacatttctattttgaattattagacaatattttattctgctgtccattttatagctgcatatatgttggcctgccaatttaaccttcatctatctgagaattacttgaaactcaggctgctaggaccatatttctatcttatattataacatttttatattactttacttttcttaacttccccctcctggcttgtgtgatgcttggctgagactcaaggggctgtagaagatatcttctcattcattatgcagccagtagctatgagttgcttctgaagtggtttccagtccttcctgggctcggtctctataagcaacctgagagagagtggctcagtttatctataactctgacaataaattgtattttgataagttggagtagcttcatgtgatgttccttgcttttcagccctgaaaaatccagacatctcagattaattcttgagaattacagaaaattggaatgaggatgttcatgtttcttgtgtgcctttccctttgttaagcgttttccttgtatgctaaagaatgctcacaggttggtcttcctctgggatagagggccctggggctcttgtttcactttaaacacagaaataaacatttttgaaaatggaagctaactcactttctcactccaatttcatattgctccttgtggatatatgtctatattctgtaagatgaggtagagaaatcaggatattggggtgacagtgcttaatctcttaggaaaacttatgtcttcattgttgtttcaggcttcttcatgaaagtttaaagtaaatcaggctgttaattcacagatattctcactctaatgtccctcctggaaaaccaaaacagaacaaatagtttgcaaggttcattatcagttgtcatgacatctcttaccatttctataccactttcttaaggctctattcacatttttattttttaaaaaggtcgggttttttgagcaacataaaactttgagtctcaagttttgagactctcagagttaaaaagttattaagctataggctgtggagagggggcagatggaagaataggactcgccagtgatcatctctccacagaaacattaatttgaacaactatccatgcgtgaaaataccttcttaagagctgaggaaaccaagtgagagatcatagtacctggttgtagcataatatgaaaagatgcattgaagagggtaggagggacagttctacattactcacttgcatcacccctaccccagccccaggcagcacaatgcagaaagatactgtccactttgggaaaagagagggaagtaagcacaagactttgccttgcaccccaacaccaggcccactacagtaaagcccagaaccaggaaggcctccatggcccaagactatggctggtacccacagattgaacctccagactcaccttggcatcaggtgggtccctgtagctccaggctttagacttttgaggcagacttgatctctggtccgcatctctagtgggctgactctagcacccctggaatttagacagttgtcagcagcacagaggtctcagtggcctgggtctttcagcttgctctggtgctcccctgggcttctaacttgtgtgagcgccacactggccctagcagccatgggcttctgatcatacatcagatgtcctgaccagaatctctggttgggctgttgaaggtgttcccagacaaagccaatctgtgaagactggaatatctatttattcaaatgcacaaacatcagtacgtggccataagggtacaatcagggaaacctgacctcacccaagggacaaaataaagtgccagtgactgacactaagaaaatggagatatatgaactgcctgacaaacaattcaaaataatggttttaaggaaattcagagaacctcaagaaaacacagaggaacaactcagtgaaatgagaaaaacgataagtaaccagaatgagaaatttaacagagattgaaataaaaaaaatcaaattctggcactgagaaatacaatgaaggaaatgaaaatgcaagacaaagcatcaacagcagaattgatcaagtagaagaaagaatctgtgaatttgaagacaggttatttaaaaatgtacagtcagaggagaaaaaaacaaaagaaatgagaaaaacatataggatttatgggacagcatcaaaagaccaaacggacacttcagggattttccttcatggctccccaactgtctcgatgtgtacggtgccatcttaggaaagaccccttagcaattcatggctgaagagctctagctcataatttaaatgtgaacatttctttctcaggcctggcttctggatcttggaattctccagagattgatactgcaattgccttctctgtcattgaagcccttggtacccacaccttgccctgcagacctcaacaggaggactttgttagtcccaacaccagtcatggctccagtcgggtgggatgggggaaagtcaaagacagtctgtaagtgatgcatgtgtttgcatggtggccaggaaccagcagaggaagctagtttgtctattcttttctctcgctgtcatcacgtagtgcctttaccatctccgggtggtggctataatcatatggactccttctatggacccagtttcctgaacttcccagaaagaaacaattcaacaattaagtttaacaaatgttttgggtgcctgttgtgtcaaggaaagcacataaagcagactttaattctttaaggggttcaggcaagaatctaatgctcaaaggtaattctgagaattaaacataattggaacttagttatttaaatctaattttttttgtaaacagatgtgagtcctagcatcttacatgtcaattaattttttcttttaaattcgggtttgaaagttatatataataggttgtagcacactgttctaggcacatttctggatttagacatgattaagacatggtccctttcctttaagaacttaatacatataaataacaaaagtcaaaacagtcataaatattttaataaaatagctttcccataaaaagtgctctgggaacacatgagaggtagagattaattttgagaagtgtttttatggaggaaatggcatttggttttaatcttgaagaacaagtaagatttgaacagatggacataagtgtttccagggtgaaggcccatctttagcataggcttggagacaggacacacaaggtgagttagagggtgtgtattggataggtcatggaaatgatgtttgaaagttgtctggatcttcttgtaaatgagtctcggtaccaggcaggggagcttgaacttgatgtttatgatcttggagtgaagccaataattactattttctttttaaaaagtatctggctcttagaaaattctaagaataatgcagaagtgcaagtaaatgctagaactattagagttggcaacacaggtaggaaacgtgcgcaattagaaaagaattgttgcagaacttgaagactgaggtttcaaaccctggcacagtaagaataagcttgtccttagggtaagccagaacccaatctctccctctcagatgtagtgagtctctaccatgtatcaggcagtgtactcagaggatgcagagtgagtgagaaatatccctgaattcagcttagcagtagagccagaaaggtaaacaaatgagtgttgtattaaatgcacttgcaaagtaccattgtgaaatgaaataacaggaacaataatgactatcatttaaaatccacttgttatgtgccagactctgttgtaatcactttacatctgttaactcatttaacctctatgaagcaggaacctttattatccccattatgtagattaaaaaactgaggcactgagtgtgaagtaactttcccaaaatcatccaactagacagtggtatagaggtaggattcaacccctattttttgtggctaacaactatacctgtcaggaaacagctggggcagtaggcaggggtgagagaggagtgagaaaagatggggatgggtatttcaggaaatgaaattaacacatgtaaaggcataaggagaatttgagaaagatagttggcgattagagacgaattttactttgggtctgatttcaattgctggtgtgatatttaggtgggaatgcctcactaacgatgtgggtatttttggagaagtcaccaggcattttctctctggcctctttcctctccatgttaacagtcgctctatagtggtgctccacatacattccatctctgtatgaacagggaagtagctgtcagtgaggaagatgtagtactgtcttctagccttttcctaagtggtccaattgctcattaagaatccactccaacttagtaaccaaacagtattgtaaatattgatactacgggggtattctcatgacccagttgcccccagcccttaaggaacttaaaatttagtgagtgacctacccaactgtggcagtatctgagtagctccttctaaacttagaaagatggggttaactaaggataaataattatcttcacagtttccaagcagaaattgaactgctcaaagtaagtgtgtaaatgtgggtgtatatgcatgtgtgaatatgtgtgtgggtgtgtgagtttattttctattgagatggaggaatcataggtaagtatgactgatctcatagatgaagaagtaaaaagcttcctagttattcagtgtacttaaacttctctgaaacttattttaggttaatgaaggaaaatatttgaggttcttgccttagaagaattgccttagtagtccctcccctaaaatgtttttattctgaccttgatgcaagagtcagtaaagaccatttcagcagtgattgtcacatatcaccttccctctaaacatgaagcaaagtgaaactataatctctccagcataggctgtttcagtggtctttcatgtaggaagctctgaagtaacaccagccccagctgtgctttttgggataactatttcataataagaaagaaatcatattttgagacaacagcaacaaaaagctgatattgtgtctgtggttctgttttgagtgccaccactgaattaaagctatccaaggaaatgaaacatcgaggttgggggaacattgtgtgatgtatgttggctgaaatactaaacactccagtataacatcaatatataatttgtatggttacaaatattattggcataaataattcatgctgctgctttgtatttacttgattaacagcgtctttgtcatttttgtcagtcatgatgccattgcaatcttgcacattgtgtttaaagaatactcggggaaatgtttcaactgtgtgtctggatggtataatgtatttattcatttagtcagatgaaatgaaagagagagtgtttaatatgcatgcctgcattatactagctactctctaaataaattacagacagtattactccctttcattgtaagaaaaattatagtttgatttttttcaagtagccaacatgctgccattttgtacttttaattacaaatttttgaggtttttcaaatgagctttgaataatcctgaatatttttgtattgagatgtcaataggaaaactttggtaacttgagtgggctatatcaagtgagaattgaattactctgcaaaagaaggtaaaataagttttctacttgtgggtgaatatacttctggaaagtataaattcttgtgacagagccatgcctttgaatttgcatcactccatgtagcagccgttgttttggctatggaagtacttcccagagctgccaactgtaacttcactggcattgtctattttgtccctcttccaattctctttcctacttcctggagcctggacctctggcctgtccaatgccttcccttgcagcacaccacccagcccttctttctttgattacctttccctctgtctttctcccaaaagaaaactccattcctacagctagtctctgcttgaggttagatttcatggggtgattgaagtaattcatgctcaggtttggatgactggtatcaaagaaaaccagagctggacatcagttaaagcagtacaaagagattttactcaggacctttgcaatatagggaaagagaccttagtatagaacagggttcaattctgaatacaccaagtggcagggtggagatttaaagccaagtagcagagtagggaggtcaatggatagaaaattactaagggagtagggataattcttgtttactggcctcacaggattctggctgaaggcaggctaggatgatcagatattacgtgggggatgatgggggctgaggaagatgatcacatagcaaaggtgagggattctgcctaaaccaacttgtcaggactcttgctaaaattaggcaacataaagacacacacggaagtccaaaagtcgaggcctggttgggaagaggatttagaagagcctgactaaaagtttggtcaatgagagactgtatcactgggaagcataatattctatgaggaggggttgtattttaaatgaggagcaaatcaactcccaatcaggctcaagttttgagacggttttccagaaggactcctcagagtgtagtcttgatgtggtgcaatggaagggtcatgctgaatttcttctgatgaagaatgaaagggtggctgaggctctggggccatcagcaaggcttgcaattggcagggagtggatatgaggtctttcttgaatattgttgaatccgtaggtcctagtacagaccctggcataaatggtgggagctcagtaaacctgttcaataaatgaacgagtttcacagatgaggaagctgacacatggagaacgtggagaactttgctctgtttcctttcacatatcagttaggtaaaaagttgcctttatttctcctgccctatctaaaaggctgtagtcactagataattgccagtcctttgctcatggatggcactgtaatttatccttacgataagatgttattaataggctgatttccatataagtatttagtctctggaatcagaaagatgaggacaaagcattttacagtcacactagcacatttttgaactcacgtccatttcccatgactggaacattcagcttatgaacatgtagccaatggagagaaggataaatcagacctgggagtctctgagttttgacttcaggctcctttcagtcttgccaagctgcttttctgaattaagtatattccctttgctgtatcttgtttcattttggaagagactggccctttactttctctcagaacctgctgaggcaggaattctttggtactgtattgaacaaagccaggtaaagagagcagcccttacaccagcagctttggctggatttctgagaacctcttggctcttcttagcaagatgtcaattctgtacttaccagttcttctaccgtgactcagattgagtgaatactactataaccctaagatggttagatcaaaaactctcctgtaatttacattctgaataataatttttaaatgaatcctttaaaaaagttaaatgcatcctaagaaatagaacatggatttatctgtgccagtttcttatcaagaggaaaaaatttataatgctgaaaatgccatttgccttgtctaggcttctcattataagagaggcattttacatggcaatctgagagtgaaatgtttttggattttacactggccaggctgttctgaacagactctgagtgaaaatagtcaaatatgataatcatctgctttggagaacagaaggaagccggtttaacttaagctggactgattttttaaacttggaagacactgacttctggtttctcaagaaaggccagaggaaggaagtgttttcaaggcactctataattttttcagattgttttaccaaatttctgcttggttccttttgtataaaatgtactctattcctgcaaaggctcaggttttcccatggaagcatgcagatttcacaactctgttgaatgagataacttggcaaatctcacagacgtgcagtggagcagagtgacataatgaggtctgaagaccctaagtaggcgtttcaaatgcataaagaggagcccagtcattctctgtgtgcccaggtgacagcctgggttgggggcaacctaaggaagagtcattcctctctactttgagaaaagatgaaaggaaactgagagggaaagattcctccagaaggtgtttgctttgttttcccactcttatgtattagaccctaatgtaggctttttttatttaaaataatattggaatcctttatctccttagcagttacctcctgggaagggtggtgaatgacaatttaattcctggaaatgttagcagcttacaatacttttgtttcattttctaaaactcaagtccacagtcctttgtcaacaatgatctcaactgtggaagagaaacttttcctttcctgctattttcttcctttttctcttctctttcctcctatcttccccccatcttttcttctttccctcctttttttcctctctcaaccctgacagcttcctgggcccgtgccgcatttacatctgccaccttttgattctagattgcatttggaagtatgctgggccatgtcatgtatctgaattggaggtgccatgacagcctggccggctatgtctggggaccccaggagccatgggataactgaacagccaactgcagattcttatttgataattctttcccttctcatgattttaaaaaggaaaaaaaaataatgcttatttaaagcaatcactagtgactcagatcaaccctccttaggactcaaccactgtccagtctctttttaagattccactttccctctgtttccccagtaaccttgattaattacattaatattggcttatcacatccctggtagctttcacaaaatgaatcaccttacaaagataattttaattaccattcccttgcaacctttaaccattcttgcatatgtattttgttggtagcatctgcttgaattgcaaatgcaaagaaattaaacactttaagagtggctttcttccagttttgtttttcaccagttttgaaatctctgtctgcccaaattaatgcaggtctgagaccactcagttcatgtaactacctgttgtgtcattaaagacaaaagaatccagttccactgagaaggctcttctagcctgtggctcttctaaaaagaagtcagtgtaggttttgaaaatgagcatccacacatctttaaaatgatcattgtctgcttagaaatcctatccaaattggtcctaagtcacaattcctctagattttctcctattatttgaaatattttcagtttttgattcttcaaatggcaagcagctgtgccaattttcttggattttgtcatttgccagctttttcttttgaaaatacactcatgcaccatattctgcttcctggtgcctacatttggggagtacccgggttcactttcacattctcaaattgcatgagaaatagcaggattttcccttcttctagtagatgcctaatgagcactcattttgtgtgccatgccatgccacgtggaacttctggtcaaggtgttccgtaaggaaagggtgactgttctcagtagttggcagcctactgggcctaatacagcagcctctgaagggagccccgccacccactacctctctcatggcaggggtctgaaataccatgggtgaactcggagaacattccacagtgtttctgggcctctgtctccttaactgtaaacttagttcatctaaatgtatctccaagatccccttaccattgcagggctatcgcttccttcttctgtgttaagagattatccccctttaaaacacaaaattgtactttaagctgtgcacattcattgattccacagcagaagcaagcttatagaatttctaatttgagagcttctggagagtgtgagggaacccgggatgggggccttagaaagcacctgcagacaaatttccttctgtttcacactgctcccaagtactgaccagcctgaccaacatggagaaaccccatctctactaaaaatacaaaattagtcgggtgtggtagcgcatgcctgtaatcctagctactcggggggctgaggcaggagaatcacttgatccccaggaggcgaaggttgaggtgagccgagatagcaccattgcactccagcctgtgcaacaagaccaaaactccgtctgaaaataaaatatatatatatgtgtgtgtgtgtgtgtattatacgtgtatacaatttggtacgcaatgtctatatgcaatgatgtataaaacatacaattcttttcctagaggagtgaatagtgaatagtaagttcagtgagggtcatagaaaagtgaaaatatattacagtatttctgacaagagccattattagaggaaagcccaaaggagtatgggaggccagccaggtaaggggtgtatatatatatatatatatatgtgtgtgtgtgtgtgtgtgtgtgtgtgtgtgtgtgtgtgtgtgtatgtatatatatacacacacacatatatatacacacacacacacatacatatataaaataaaatctcacaaactccgtagcatgcctcaggtgacctggtcccagcttttacctctctagctttacagctccctgcctcacacccagtactccagccttattaaaacatttgtgttcctgccagtgtgccaggcctctgcccgccctgccctccataacctcctccaagtctcagtttaagggttgcttccataggaagcctttcctacaccacttgctccatcctagggtaagcaccccttacctggctggcctcccatactcctttgggctttcttctaataatggctcttgtcagaaatactgtaatatatttttacttttctatgaccttcactgaacttactattcactcctttaggaaagaatttttcctaaaggaaaaattcctaaaggaaaagtatgttttatacatcattgcatatagacattgcctaccaaattgtaggtgttccataaaaatgtgtcaaatggataaatgaataaatggagattttttaaaaggcaacatcattgaaatttgaaaaccccctcctttttttctctcaaaattgttcctctctgttgacagagttgcagtctggtacagtcagtgtaaacgtcttatttctcctaatgcccttccttaacctgctctgattcttgatttattccaaaagttaaatttgaaagcctttgggcatgcaaatcccaattcatatcctcctatgaacaaaactccctatgagtctctggtcacctggcagagttttttttacaagtagcatcacatatgtcaacactggctctactaactaaaatagcactaaaaggtgccttggtgagaatcccatactttttgagctggaatagaccttcaagtttatcccaacttgcttgtttttaaggctgggaatagcctggtgaattttcaagatgacagcagttttcagttggaaggcttttagcttctctttaggctagcttacctggacagtcaatatggctttataagttctatgtgtcagatacaggcatgataatgtccagcactatgaaaagggctgtctctttctatgagtgtttcatcagaagggaaaattttccagacacctccaatggatttttgcctcctacttcattgacccatacaggtcacaaccaccccttaaaccagtcacttgcaagagggctgggattatcaggatagaccaggatttaaacaaaaaccagaaatagtgtggttttattgaggcatggatattagaacaaaattgaggttccctcatcaaggaagaagggaagaattttttctggtaggcaactgactgcttagtaaaaaacgaactggcatttttttgcagttcttcataagtatattaatacaactgctttccacagtgctttaaccacagagctttgcaaatgccactcctcttgagaagccaggaaaaactactccaagattaggaatgggcagctttatttctcacttgttgcttctgttctgaatgcctgaaagaagttgcttccagacattgatcttttatctttcagagtattttaaggagctgtgtagaatttttgtttgatttatggactctgggggacaagacaaattgagatgtgaaacaccagcttttgttctttctgtcaatctaatcactttcagatgaaagtgatgaagaatgacattcaggctgatatcacagaggaggtggagtggggtggggtggggtgtgatgtgatgggaggggtacatgaggacaggcaaacactaaatctggttgttttattaaaaaggtcagtgaaatcaaactgagcagacagtttttctaaacaaaacgaagggaaggtaagcctctaggtctaggtcagtctgccctcactctagcatggttcatcagcacagttgtgaaaactcccttggagaggtgagcagagtgaggccactgtcactatcttgctcccagtgacccccagagtggctaaccactgaccccgctgctgggttaggattgaaaaggttataaataatagtattcatatttgatcctagttgttcataaaacctggcgtcttgttatccaggaaacagctcaaatgtcacctcttcacagaggatttttctacccaaaccaaagttttgtgtctcctcccggcaaaccatccagcccttgtgttttctctcctgtttgattctctgaataacacacatcattatctgaaatggtctgcatttgtttatttatttgttcaaacttcattagaagagggtgcctcgcccattgctgtagccacaccacctgaagcaatgacccataggattgggtgctcagttgttgaatgaatgagtcatatttatacaaggaagtcatactctgtacaggaagacaggaaattaaaatagatttctttacactcggaattatgacatggctgtttgccttgattttatcaaaaatgatattcatttatccatccatccatcatccatccatccaaccaacaaacatttcttgattacttaccaggaattatcattcctgctggggttcttgtttgaaagtagattgacatttagtagggaagacaggcatgcaaataagtaagtgggaagttgtgactaaaattatgtataaggagaagaggaagcaatcgattttgcttggggagaaatatcaagaagacttgaacacagaaagtaatgcttgggctggatcataaaatatgtatgtctgtttactaagcaaaaaaagggaaggcaatcagcatgagcaaaggtgtaaagatgtggcatagtatagaagggtgggagaaatgctatagccacaaagggcaagagagtagccttgtatgggtgaaggtgggaggagaggcatggcaccaaagctgaggctggagaccaggcagaggacctcaatccttccacacagtaggcttttgatagaggaagaaaggagagccgacaaaatctctttgaaatgtgactcataagcttttaagtaatctgttgctagtggtgataggtttttattaaaatacctaatgtaagataaacctttatataagagaaactttaggaaaatatttgaaaataaaatttgcaatatttcggtaataaccctcgttatcttgtgagaagttacttaggaatagctttaaacaactagctttggaaaaacatcctatttgaccccaaggaattttgtaaagcattttagccattaaaggaaaggaaggttctattgagtttttaaaatgggctgtgtgagcccatttgtttaaactaaacactgaagtgtcttaggttttaatgagcctaactgaaaatttagctaaaaacaactcattggaaaccagatggtgcagccaccattgtgagctgagctcaaaccccttgttttctcaagagcatgtcaatttagctccacagaactcatagtacaaagatgctattaattatgggagcctctgtaccctagtcactctctccatccaccccggccaaatcaacacatccttcccctcttggaaattaatgctttcattaaaatgtgtgtgtctcttggggaggaggtggggatgggaagggatgccatttccccaggttttcatctgttagggaaaaaagttattcagtgacactgggaaaagcacagtaaggcagactttattcaaggtcattgggagaggcacaggaaccattgcaatagcatcttgcagcgggagagaaataatggcctcaattttgaatacagcttgagcaagtgggaatttatagcctaggtgctgtgtgggggttagcaggtggaaacctactaagaggaaacttcaggattaagggggattctggctaagcaacctaacaggactcttgctgaaaacaagcccgggtgatcagacatcacctggggcatggtggaggatgaggaacataatcagataacagggattatcagctattgaggataggtggttctagctaaactgacttagcagggttcttttgctaaaactggattttacaaggaagtgcatagatgggcctaggaggagattcagaaggctaactaaaggttggacaagcaaaggattgtcacatcctcttatatggcacgcaacagccaagctctgcactacagattaataccttgagggctttagtaaatgagggcaagaagagggatgtaatggatctcttgaagagcactgggtgagggacagacaaggacaatgaaacagacaatgacagagttcagaattatgattccatgatattataaagggtgcctggcttattaagaggttgtgcttttcagttgtggataccactttccagttttttgccttaatttctattaattctttaccgttggccatgagattagccaggcaatttgttttctcctccctctttttgtatagtaatctattgggttatttctttccatttgtgagtgttaaggtctttccaacgtgagggtgaagcaaaatgtaaggcactggaatcctttccaccttctttgttcaagggcttagtgttagaggctcctcatatcttcagtggtcctgactggactcctgtgaggggtcagcttctaggccaccaggcagagtgttcaggaatagttatcaattgccaatagacaactgctgactcttacttaaccctaaaacctgagtcttatcccatcagccgtgggtgcgttcctaatggcgactcttgaaagattcatgtggctgccttctggttaaaggttatgtttaaatattaggtctgtccttccaactttttgtcaacactctgcctgaatgtaaagtccaggtttgagatttattcccccaacatttataaagtacacactatgtgccatatacacacacacatacactctctctctctcgtgtgcatgctctctctctctcttatataaaacacactgtccttgactttgtgggatgtaagctgtgcacaggaaaatcacaaaatgtagattattacagcacactacaaggttgatagacccatgaatatttgtaaggagaagtcaaatttcagtggcgtgtttgcgtgtgtgtgcgcgcacatgtgtctgattattttatgtgtgtacatgagagagactgaacttctgagcagtccaaggagtaaattaattaaattggttactgggattataatgagattatcatcattgaattgtcttagctgatacttcaccaataggataaaccccacttccagagtttcttagagggtcaagtgaacaggaagaaaaattatgggaaccaggtggagtgggcagaaggagggcaggtcctggcatggtgtccctggaagaaatggagcgaagtcctaaattgggcctgacttggaagagcttcctttttatctattttaagttgaaacttggctgaccctgaccaagaggagtctggacttggcttttctttactggtctcgtgggttccttatgtagttgctacaggcagttgtgaggagagcctgttggcattcctttctttgattgacatggggcattggaaaaaggtgaggggaattagaaaacagctagaagaagaaacaaatgagtcatcctcccatctcctaggcctttattacttgcattttctctctgaaagttgattcaggtcagtagggaaatcattagtgagatagtgtagctctttaaagatttcttacttattgatgctgaaggccctttgtgatgtgcattttctttgttctattcctccacagtggtaggagttctagataaaatattaatcataaaggtttttaaaaatcatttccaattgcacagagatattaggagttatggccacaaagccttggtacagctatattttactgcccacgtgtcttcccagagatgacacatacgcttttcattttgctgtcattattcttcatgagatcgcagggcatccatcatcactgtggtggaaaaatgaagatgagggacaaaagcaccagtctctaagcacaagatgatgtgtttgtctgtagtggctagggacaatctccaaatgcaggaaccataaaaggctctgtgacttgtacctcaggaatgagattcatcagcaatgaaatcagaatctcaacagcagtttgatattgagggattttgagaagctgtgtctctgtccgcatgtgtggaattccatccccacgggcagtgtaatgccatcagaatctgagctgggatgaaaaagtagcctgctctccagaaagtcacatcaagtgtggcttagtttatggcaaagatgaatggggtgttgatgtcccaagagaaggggatcttggcggacagtgcttttggctctttgttgctggtgggaaccccagctaggctttgaaagtggcatgggttctcaagtacctgacatgttcttcatgcttttattgacgttagaatgttgttttccattctgagaagccagatcacaaggacagagtgctgtgatgagcataaatactatcaaacaaggtctacagcaacagcaatagttattatgtcatgaacatctgctttgtatttcacaaagactctgtcccagttcctatctgagatggggagatgttattctcagatgaggtgactgaagctgagagtggttaaagtgtcagggtcacatgtctggtagggttagagctgaaatttggactcctgtaatgctaagtaaatttgcatgctgccatgatggccagttacatggaatcatttaaacctctttttacattaagcctgtggaaaatgaattcccagttctagagtaccgcctgccctggttctacagcatggttccttgcttcttctaagtctctaggaccttggcagagtagcatacagtggtgagcagtcttcttttgagatgaaatgggcccagggctgcctccttcatgacttcattgttcctctctcggcctgtttctgtgcagccgcttgtcatgtcagttccactttaaaaccagagtaaacagttcttaataggtgctttttaagtttaaagaaagatggaaaggatgttcagacctagggaagtagacctgtctctcagcaggtgagttattctgctcctgatgtttttataccaaactgaaaatatacagtcacacactcacccctggggaagtgcagaggactctcttcatggggggccagtgttactcttctgtcctgagtgagcattcagtttattttgatccctggcctcaaactcaaataccctactgcagtcaaaaagaaactcccaagtcagaatggggatggtcagaattcatccattcctgccagtggtaataaatggcttctcttttgggtcagtaggaagtaaattggatgactcctcagctagtcaccctttgtaaagttctttctgaccttgaagcttagaggaaattggctggagggcaaaacagtatttcctaaagtgtttatgaagtagctccccatgattcttcatggccagcactctgtcctttgtatctgtggctttgttttttagtgttcatgaagtattggagaaaagagttccccaggcatctcgtttggttaagaagattgcatctccccattgggacatcctggctatttcccagcaaaatgctctgcctccctcgactgtaccacataagctaattaacctctttatcgattctctttctccttattttaatttcagctggtatttctctaggccctgggccttgggaattgtagactcatttgttgaacttctggcagtgtgaaaatttctaatagtttgctttctgttcccatgcatagtgaagtaggcatcaaagaaaataattgatgaaaaaaaacaaggcttggaaaaaccccgaaacaacagccatgctcaaaagagggaagaggaccattgggtacttattttttttttccttgttgggagctgttttccttcttttccctctgtgtggcaaagtagtaaatggtcgtcttattagctgctcagaatactttattctataattctatatgtttctgtggttctatacaactgccttcctttgagttcctcctggagaactagaccccttcccccatcaccactaagccatacccacaatcaatataaatccaaggagatgggatgaatttcaaaaccatagagggcctagaaagtagagaaactgttgtggcatttacggctcttcaatgtccttccaaacagaagaatgtttctgaaacactgagcagcagccacacctggggtctctaaaggcactccaggatatgaaccatgacacctgataatgtgcaacaaaatgagctttgttcttttgggcctgtggcacaaaacattcctttgcccgtgttcaggcacctcagcttgaattcattttgtttactgactaatcagacaactttgtatttattctctgctgcttttgaagaggtggtatagtggataagtacttaggctaccttttttggaaatttgcctctgcaagatgctttaaaatctgttgatgagcaggtgatgtctaggtagtgaatagaaaaatcgctttagcttatatccggagtttgcaaaacaggaaactttcaaaatgatttgtagtttgattctgaaaccatcttagctctagctaagatggttgtaaccagacagcatttgtcacccagggagctttagaaaaatctactgtttcctcatggggagtagagggatagattttcaagaatctttttggttcatttgaatgtgggattttccataacctaaagtaatgattaatagtttctctgctcatatcaggttttgttggccagatgtttctttcaagaacttcaatcctttattgtctaaattgaatcagcatcagataaaacatattgcaacctcaaagtccattgcaatccagcaaaataagatgtggttatgaaccaaaattagaggaagaggctaggatggcactgaaaattctaagtgattttcagatatgttaaaaatggctttctcaaaattttgaatctttggaaaagccatatgattaatctacatgctaaatccctttttattttacttctcagaacacaattcccaaagccattaccatactccaaattataacgtttatcttgcttattcaaaaactgtgaaaaatcagatcatattttctgaaaatagcttttctgtacttatattttgcatatcacttctgattatgaaattgaattaaaggaacgagtcgctattgtgttatctgcccacagattattgcaaaatgatagataaatgctgtactactaggatttccatttagcccttatatgttagctgtaaagggagggatagacacatgtatctgtattagtagttgggagtcttcatccagtaatggaaattggatcagtaatgatcattgttttctgccccaaagagaggcttataggattattaatatgaatactacaaaacatctgggtgatgcttgtatctaacagtttatcttggtgatgtatatccagaaactgaatttacagttgcaggcaggaaatctgggtttatatttgagactctgctttatatggggaagggtgagcaaatattaaaactctaaaaactgcattctccactgctctaggtaaagcctaaaattctgtaaattagttgatcattccttcatcttgtagcagcctgatagaggaagagtgtggtgtggtctttggggtccgaagaatttggagaatggtccttaagaaaatcaaattatctttttaagactatttggggttttattctgtaaaatgtctttagtaatagacacgctacattaagatcaatataaatgaggtatggaaggtctttgttctgttgttccacaagtactggaagttactattttcttgctaaaataaacattcttaagaaaaaaggaaatttaatattaatcatttgcactttgggatgaattaagaatttaagagcagatattaaaaacactaaatgtaaagagggctttaaatggctggttgtctgagtcatgtccagaaaaatggatcctgaaagacacacttcataattttgctagttgtgtgtttttatttaaactcttgaaggacagctagttacattctttgttttattgatttctctggaagttttaatatgtagaataaagacatttcctgctgttttccaaccttcaagaatgaatttttaacttaattttgtgagttttgctctttaagggaaagagtggctagatttgtttgatcagagtttcccttggggagggtagagaaacggtgatctgttcagagaggattcgggagaaggtaatatgtttgttacttcaatttattgtagggtcttgatggtccatgcagcctaaacttcctagccgtgacatttgagataactgggggtggggtgggggggggacctgtcttctgatttcttttcttttttttttcaggcagatctatgagaaaggaggtgaattcagcaatttggtcacaagcttaaagggagggttgggaggcagaggagcaagttgagacctcatcacaggttttgcttttagctggatttatcagacaaccatatgtgagagtgaaagaattaagccagagtgaggggtgcctgaaatcagagacctttcgcacctcactgaggctgcaagagggacagctttgaagtcatggtttaatattcccagatactttagttatttcttttttttttttttgagacagtcttgctttgttgcccaggctggagtgcagtggtgtgatctcggctcactgcaagttccgcctcctgggttcacgccattctcctgcctcaacctcccaagcagctgggactataggcacctgccaccacgcccggctaatttttttttttttggtacctttagtaaagacgaggtttcaccgtgttggccaggatggtctcgaactcctgacctcgtgatccactcgcctcggcctcccaaagggctggaattacaggcacgagccactgtgcccggccctagttatttcttaaagttgactaagagtggtttccttcggccccaaaaaactatgcattctaaaacatgaaatgcttctctacacccctactccatttaaattttctgaagtgcccatttttcctgtcttacatggtgaaatcctagctgtttatttttatgttcttcaagatttagatggtgtcaccaggaaccgagtgctctccccattccactaccccatgattttcttacaaaacccagattaagtttctcccagataaacagataaaactaacctagctgatttcttatatcaaagttaacattgtgaatgtcaaagaaccaatgctatgcaatgatgtaaaatatcgctctaatttaattcccactggtaggccacatgtttgcttcagtattttaccttctaagctgggagaacaatgcagagatagcacagctatattttaatatgcatgttacccaccttgaattaacataaggcagcttcctaatgctataaaatggaaatttatgacactttcagatataatgtcgtgcacacgatatgagtttttggggtggttttgtttattcctctcttctcctcccctcatttttaattacatctgcctatataagtgcacagttaattttcatcggctgcccatatagcttgagttttctacttcttgtgttcggaacacttatctatagttaagttttgaggcttaaaagtcagtcatttatttagcacctactgtatgcccaacaggttgtaactaactggtgaacataggtaaaatggaggcattttctcacccacaaactgcttgcaatgaagatgtatttataggggaggggaaacaatggctgaaggtaacataggagattgttttggctgttaagtaaagagatatgacacacacacacgcacacacacacacacacgcataccagattttatctatgcaaatgaacatttaccttagagaattgcacgtatttccttcaaaaatgttgcaattgccctataaatttgggagctactttcttttggtgatgaaatacacaaaccacaaaatttctttttggtctgttatcatatttactttctaacagttttatccaactcaatctttcaccttccttacccgtttagaatgatattaaatgtaaaaaattaaatatactttttaacaaagatgagccatattatttttctatattcaaagggatgtgatgtaggtaatttcagaatgatttaaacatcaatggtattagtgcctagagacaacattcattttgagtacaagttttgctagttttgctaaataaaattgggtacattatttatattaagtatcaaatagtgtatgtgtggaatacaggttcttgataattaggccccaactaagtgcacatagtctgtgggtctaagttagatgaaaaatgtcctaataaggagcaccttgcaatggcccttgctctgtgcttcagccccagccaacttgcccaggacagaggaactcatcccaagactgtggcaggaaggttgataactattatggcagtacctgtttcttacttctgggcctagctatcagttcatatcatccaagatcattacccaaacatgtagacatcatctcaggcctctaacaacacaagtagccagcctcattttagaacacaccagaggactcttgacattctaaattgtcatcttttaatggactcatcccttcttccttctttaggaagttctcatatctgtgtcccggtctctgttgtctgttcctgctgttctctgctgtctgtatctgctgttcttcccagaccacaggcaggttccaacatgtgctttaatttagtctcatctctcataggatgttgcccacctttaacctgtctggtagttgatgtgtgtacatgataccttttgttgggttattctggttttccttctgctgtttagatgagagcttcagtcattctttggtcactcaaacactttcagacataataacacactaggcttgtgaccatttggtatttggggtctttgaataatgtacactgtattttgacagtggtctgggacaccatcaattgataattgttgcagcagaggattgcaagataaaaacaaatctctgtcatgaaagtcagaaatcccaaatgtagaataataatggaagtttgtagcatttttagagcactatatggtttacaaaactttcacattagctattttagttcttataacggccttaagtatcatttctctgattttagtgtggaaactgagatctaaagagatctgaatgatttcctcatggtcacacagccagtgagtgacagaactgaaggtatctgaccacagggcctgtgttgttcccacctcccacagctgaaggagttggagttcctacttttctctgagctagctgcatggctttagagaagtaggatggaaggggttaatatcagtggacatgaatgtctctaatattcttcatttctaattttttaagtctatcaggtttggacacgaaatttttaaagggcatgatttagatttctaggaatccctgtttctgaatattttgggggactagggcttaggttacatcttggaatttttaaggtactggagctatttaacccaaatctcactaccacaaagaagctgtccatccatcaacaccattttcccaggcaaacaagactgggtcagtctctccaaggcctgtcccatgaaaattagagggtgctggcattaccagaaagcaaagcttccatccaggtatggatgagctacttctgagaagggagtaatcagtatggactgaagtaaatgggaattcttcctgaacatgtgccatcaagctatagagcagaagttgggtgaaatttgaaaggcggagtaacaaaggcagaagcatgcaggcatcgctaagagcttggccttaccagctggctgactttgggactgtgctttgctctcttcattagtataatgggggtggtagtagcacctacttcacatgggcaatgtggggattaaatagtaatcatgtaaaaccttagcctgacaagttgatatacagtaaaagcaaactattagttactagctcagtaagaaaccaggatagctaggaacagttagggagtctaggtaggttgggttgggtgggttggattggttccaactgacagggaaagacgctacttgcctcaagagtggatgaaataaatagctatggaataactgtatatgctttcctgcaggctcctcacttaatatatatcgtacaagacagtaatagctaatatcataggcagcaaatttgacatttgttcatttgtctttttgtaatgaattatttgaggtgaattatgctgatgtgtaccaccatcattccatttgaatatgtgtcttaatgtataatgtcctaagggctgcccaggactggtgagcagtaactcactgcaggaggcccctaatttgccatttccacaccactgccccatccctccagcccccttaagttggcagcaggccactctgtcttgtctagtaatggtgatggagagcctgagtgattcttaatcaaagaaaatgacaactccatttacatttgtacagatctgatattcacatttggatgtatgcctaaaggtacctgggttgaaaatatgtggtgtaacattgctttatcttcctaaatcatcctgacacagccttggacttaatagggagtgggacccagaattatgaaataatagcagacatgccactggaggctgaaatttatgttttatgagataaagtggttcttaactatttttgttgccatgttcaatagctagttacttttaatgtttctataataagaaaacagtatgcaaagatacactttaacagaatttcataagctcctacactatgggtaataaccagagttctgaaaataaaaccgttactttcacttgcattttaagtcagattgatagctttctttcatttataacgtcgtcctagtctgaaagcaaaatcaccattttattatttcttattcaaaggctgaaagaaaaaggtaccaagtaaaatgattttgtatgacaaggtcaataagacttggcagcaaagacttggattgaaactttagccttgccattaaccagctgtgatgttgaataagtcatctagtccttgtctcacttgtaaaatggtataatattgatactatagttatattgctattacctggaatgacaccccactcttattattcacaacctggactttttatgacccaggtctgttttgcttttaaaatcttaaatgtacagcatcccaatcttagaccacagcctttgatgcttccagcctgtactccctcacaccctacacacctgttctttgatgttgactaagccctcgggtcttttgtcagtctctcagtccccatgaaactttaataacttgtctctccagccttgggcctcatgatttcttagtttaatcatttttagccaacatgtactatctcctttatcctttgttcttccataatatccaccttgcagaccccttccctaaggtcagtctagctgtttatttttctgcatttgggctgcacagctcaactcagcactgcttaataatcaactgtgtatgtacctgctcagttccttctcctgttttccctggaatagttgctcccaatctccaccactctcctctcctcccttccgctgcccctgccttcattgttctccacaggtgaccttcttctatgccttttagaaaaactggagccattggacaggtatcccttattgggtaaatatcccacaggtctccctctgcctttcttctcaaactcatcttcttcccacattcttaccttctttcatcctaactcaatgtaaagcttttccctctgtgtgagaggactcctcctgctgtttctgttgtctcctcccttgcccagaattgcccctttcctcccagcctgcagtcatcttcagcgagacctcaggactagtttcatctcttttcagaccaagcaacttttttctaccctctttgcctccacatagtcacctcccattttttccttcactctatacaaactgatgtctgtccctgcattgctgtgtaaggtcccaggggcttcataattgccagattgaatgagctctttttagtctttatttcacttggtcttctgtagcactggctctgaccataccctcctttttgaaactcatcacatcctccttcctgaaactttctctttccttgatttgcagtcatattgctgctttcttttttcccacccgctggttgttttttcttggggttcattgcaagtccttctgtctctgtagactgacttgacctcctgaagcccagtcttctccactggactaatggacacatctgtctggatgtctacccggcccccgaaaaccttgttatgtccttgactgaagtcacttcctgccttcttcatgttttcccgagtcttctgtctcaaagaatggcactcttacccacctagattgtacaagccagagatgttatcttcctggaggacttctgtttctctttcaattctccaaaacaccatctacatgtcctgttgattctacttatttattctttggatctattctcttttcactgccagcctttgtttcagatcctgactggattaatcatctccaaatcttggtagaggacagatgaactgcaatcctggatctgagtggtagcgggtaggaaggtgggcaaggagtggggaagatggtgacagggtgacctttctggaatccagtctgatcttgtaactcccaagtgtaaactctttaacatcgtactccttacgtgacacaggaagctgttcttcattgggactttgtcttctccaattgcatatcctgctattttctacacacatgtgatgtcatagccatacacagacttaagcccttcctcatacattggccagtgcctttacttgttgcttgaaatgtccttccttgtcttccccccagtcttattcttctgatcttttaggactgaattaaagtcctacttttgctaccatttctgttcagcccagtctgagttggttgctctgtggaacttttggccatctgcgcatcataatatcaacttctcaagcggccagcctcctgcaaaccttgtatgtcctagactgaagtcaccgcctgccttctgaaaactccattttgagaaataatagctgaaaactcaagatcttgagggaaaaactagtgctagaaagactaagattgtaagtgaactctgaaaatattttcaatctaatgaaagctcttagaaatattttttttgtttgctaaaaggaagcaataaagaaaatgcagaagtcaaatgagatgctgcctatgttaaataatagatactttcaacaagtcatctaacttctttgtgcgtttccttatctgtaaaatgagggtaacagcataatgggctgtgatgagttaatgtgtgtaaaatgcttataacagaacctgacatagtagatattagctattaataataatttttcatttaccagctacaaatcttacagactatctattatttccagccctcctatttttgctgaggtgattagaatctgttttgttttgaagtatgaatagaaaggcatttttttttttttatctggttctctacccaagtgtcagtgggatctaatttattactcatggttgtggagccatcttagtttccactgttgtctcaaaggtgtatctttttctttgacttgagaatggctttgggattctatctaagcaaattaggctcagggaataaggcagaacaatccaacctttctcaccctctcctgcagcacactcgtcttcctccctcactcacacatagctcctttccctctatctgaagctgcaccctccaggccttctttgctttccttcctgtgtgttttcaaggctgccctacacaagcatctacttccgttcttcatctgctcccctcccccaagtctgtctgtctgtctgtctgtttctctctctttctctctctcttatttccaataggatttgatgttgatttacttaaatcaaaatagtcataataccgaaaatgtataacaaaagaaagtcatgattataagttccatgagggcaagaaatagcattttattcagacctgcatttgaggcattcagtagtgagtaaattcttggacaaaggaaagttaccagaagcaaatgagatgatctatagaaaagaaatatgtaaactgtaaaaattagtacacagatttttaaaatcaatctattcttcccctcttccatttgataatggtaacaccttgattataccaaaatcttgaggatctatttttttttttttttattgttaaagtatcttaaaaagatgtcccaaccttcctgggtaactctggccctttaatcaccttcacaaatctactttataataaaatttaaaaatttatggtttaaatgttgtttcttttatttttagtatgataaggtgatcagctgttctggtgacattcatgtatttgtatgttattacatgtttttttatcagcccattcctgaagctatgaatgtcttgacagttttacccaattgtgctgtttatcaaatcatttcagatcatgctcaaagcattctctaaattctctaactttgatttaggtggtggaatttgttttaattacatccttacctaagttgagtgttgaagaatgaaacttcaaagtctttgttttatagagcccaagtccctacacagctggcacctttatacacaatggagatagaagtacaacacgtctgaactactgcatcctttattcagtcttcttttttccaatcatttgctttaatactgtatttcttgagggtttctaagagtattggcatccaggaagaaattgctcatgaatcattattggtatagttaaatgcaaaatagcagttatgaagtttatacaaatctttttcagtagcttcattgctcctttttcataatcttgtagtaatttcaagccttttgttgaaatctagacaagccctatgatatactccttattaaaattattaaatttaaataattttaataataaatatataatatttaaagagaagcagtaagttgtcatcctatcactattgagttgatttttctaataaagtatatcaaatatgggtgtgtcaattaatgaaatacaataatgaagttcatttctatctcacctttgtaacatagaggccgatggattaaatttcgagttcaaaaacatgatagttttcttaatagtatatttacttaaagccatggtagaaatagtatgtgaccagatgaaaagtatgtactggctaatgtattagccagtacaaaataaattggaatgcagcaaatcccttttttgctatcatttattaagctctttgagaaaagtggttttttcccccagaataagtgagtatgtttgagaagtattagaatcctgatttttttgagtaaacgagttctctcttgagaatagtatagcactaagtaagcacaaagttaaaattttatttctggccgggcgcagtggctcacgcctgtaatcccagcactttgggaggccgaggtgggtggatcacgaggtcagaagatcgagaccatcctggctaacatggtgaaaccccgtctctactaaaaaatacaaaaaattagccgggcgtggtggcgggcgcctgtagtcccagctactcgggaggctgaggcaggagagtggtgtgaacccgggaggcggagcttgcagtgagccgagatcgcacgcctgcattcccaccccggcgggcgacagagcgagactctgtcttaaaaaaaaaaaaaaaaaactatttctgtctctaaaaaaaacaaaattgcagtcctcttcaattgttttctgcacttgagctttttctcgaaggaccttacaaagtaaattaaggaagaatactctggatctaacatcgatggttctttctcaatgagttaataacggtggatttcttttctcacgatttttctttaattattatgtttcctaaaaccacatatattgaagattttcttttagtggtgtcttcccccaaataagatgccatgagttgatcttggccataattgatttggagaaagcctctgaaaatggaaccaacagggaaaaataaaaatacatatttttataaaccttcctctaggagtaaaatccattaaaaatgaagctaaatttgttgtgtgagaaatgtaaataatttaataataaaatcgacttaagactcaggtccctcagaaatgaagacagtgctttatatataatagctgctcagtaaggagtctatgaatttaacttttaattaacagggctaccaacaggttcaaccccagaagatgccacttttatagaaaacaatgggaagggtgctttttggagttgtgtaacaatgtggcttgtgagttggataagaaggtgttttttttttttaatttactataaatattatgttcattttatgtgaaattagattttcttcataagacctttctttgtaaaaacttgaccacatatcaaagggcactgaaatccatttcaacttacagaaatgatgccctttcaggaaatttttattggctgcccttttccttaatagtgtaatagtgtatgtatttatgatatgttgtgaatccctgggcaggagttgtcaaggttagacaactccactgaaagtggagttcgaaagaactcaccttatccggacactcctgtttgcatttcagttctggaagggaaaacaggcataacaagtatttctatttctcttcttcatgaaaaccatgagagctaaaaagatttgcctagagccttattgaaaaattgaaaactgatcaaattctaaatagaacttatgtatttttactcctttagctccactgcatttattatttccaaagatttttttatgggttctgaatttgtttcctaaaatgtattcttctcaaaaagatttttttatgtttaaaaatgtaaaaacagaaataacatgtttaagaagtataattcaatcttttaaagcatcatatgtataattgctacatatttttcagtactcaagcccatgaaccgttgaatgctcatcagtggttaataaatattgtgttattattggcattaaattaccatcagtggtttattaaatctaagacagattttctggttaagagttcctgggatatcatgaggtatattttaatgactaaatccagcaattcagttattttgcttatatgagcgccaattttattttcttaatgtccctcatgcagacagaagccaccagtgaaataaaccattaatgttgcaaacacaagactgctgagttaaatgataaaaaaaaaaaaatgcagattgatactgatcttttggatcctaggcaagtacctaagacccaaccaatgtgattgaaatcagatactggcaactaggttgaaattagacttgatattttcagatcaggtgctgttagaagagatcctgcttatgagtctttgaccatatgcctacacctatttcacaattgaaaatgaggaagaggaggaaggaaggcaattttcgtgttttgtgcaggtgtccttagctgactgaggtcttaacagtttaggcaaattttccgtctttccatatttatgtcagggaaagaggatcaaatgttctctttggttcaaaaagcacagcctcattcttttttttttttttaatttaagttctagggtacaaatgcacaacatacaggtttgttacatatatatacatgtgccatgttggtgtgctgcacccattaacttgtcatttacattaggtgtatctcctaatgctatccctcccccttccccccaccccacaacaggccccggtgtgtgatgttccccttcctgtgtccaagtgttctcattgttcaattcccacctgagtgagaacatgtggtgtttggttttttgtccttgcaatagcttgctgagaatgatggtttccagcttcatccatgtccctacaaaggacttgaactcatccttttttatggctgcatagtattccatggtgtatatgtgccacattttcttaatccagtctatcatcgatggacatttgggttggttccaagtctttgctattgtgaatagcacagcctcattcttaactgctacctgtaaggtagatctgttggctgctgctagcagaaatatatcttagagatgcagttacctctgcttctatactttatattgctaatatttaaataaagcatatatatttacagaaataaatcttcctaggtggaaaatatattctgattatcaggcattttaatttacacttctgttctttattctttagagagaatttaaatagaattttaaaagagagagacaatatcttattgtttgcttgacttatatgcaaggccaatatgaaaggaaaatacaacctggaaaaatcttgggttttttgagcctcagttttaaagtctgataacagtacttgttctatcagagttgttatgccttcaagtaagaagtgctatgaatttttaaaaagagaacagaagtgctgtaatcccagcactttgggaggctgaggcagttggatcacctgaggtcgggagtttgagaccagcctgactaacatgaagaaaccctgtctctactaaaagtacaaaattaactgggtgtggtggtgcgcacctgtaatcccagctactcgggaggctgaggcaggagaatctcttgaaactgggaggtggaggttgcggtgagccaagatcgtgccgttgcactccaaactgggcaacaagagcagaactctatctccaaaaaaaaaaagaaaagaaaaaaaaagaaacagaaggacttggaaaagtgtttccacaaagaggttaggaattcattcatacagcacatattgattgagtacccaccatgcgggcactgatctgctactgaagacagaatagtgaacaagacaaagagaagccgctgccctcaagacatttccctcctagagcaggaaatgcccgatactcatgataaataaataaactgtatagtttgttagatgatctgtaaagcagggaaggaggataataagagttaaagtggagttgaagttttagatatagcagccagaaaaagactattggagaagagtcatttgagactctttgacccattcaagtcaagacctgaaggcagcgagcattcaagtgtggcagaaggaagagacatgtaaagtccccatggtacattggaggaaagggagaaggaaactagacctgcaatgtgggcgagtcggggactgggggggaatagtaggagaagagaacagaaatggaacctcaatcacactaaaagcactgtgataacaccatttacccagccactctaccaagtgtatctacacatgtaatttaatccttactgcaacctagtgagctaattgttttgtatctgttctacacagttagaggttctaactctagacccactaattagtccaagggaacctcatacctctttcaaagcctttcctcgtaacctccacgtcctctatagggcctgcagagctctagctacagatagtcaattctctcctagactatgtgaaatacctgctcgagaagagaagatttccaagagtcagcaagatgctgtgcttacccgtctcacgatccctgatgagtcgacctaaactggaggcatgaaaatgtggtggaaagaagaatttcactggagtcagggaaaactcaccctccttgagacgaagctacctgataggtcacagttggatcgcagctaaatttaactataaatcaatgcatttactaactagtcagctaccctcccattcaggcctacccagagcttggggcagatcatatttacttaaaacagcccttgttctttctcagtgtgtcatcatatttcacccccgcccctcccccaagatttcagacaaaagtgttctcagcattattgtcctgatgggagagtacaggtttctgagaggcacttgactacttactcccagcaactagcttcccagggatggatgtgtttgctgacaaattgctgtagtctgtgatggccatcactttgaaggattatgaatatgtaagagccatcctgcatttataaaacaactttcagttttctaatgtcctttttgtaatatgcaggtctttgctcagaaatcacaatcgcaaatgcagtctgtgctgacacagaagacatctgttggagggggagagatattttcagcctttgcggagatctgggtcttctgctattgcaggtggaacaattaataggccataattatttctttcatacactgtggagagtctatatttggatgttattctttgaccatcttgagttctttaatccttaagtatctaaaaggtggtgaatggtgtcagtgatatagaataatgctgctcatttattttttctaaaaaattgaattttgctttccttatttcttggaaacagatcgcttacagcaattgcaagattcctatatccctgcatttgaagaacttatgttggataaaggcaaacacctttattctcttgtcattgactgttacatttttagcttaaaacttcacatgacttatattttaatcaaacaaaataatatatttctgaattgagtacctgataacttaaaactataagtaaacctttaagaaggaaagaacacgtagtatgaagagttattaagatgtaaatattgttttaaaatgaaaataggatattctttctaaaattaacataattagccagaattgtgtccagttataataaaccaaattccatttagtcctaataatacttcattaggttttttaaaaatttagaatatgctgcttaaatgggaaagtcttagaattggccactcaaaagccagttgaaaagtggtctcagaagtcactgggtatagtattgcctgtgttcttaaagaacatacatttttgggatttaagaaaagattttacatgtaagattctactaagcaaggaaagaacaattcgtcgtctgctgtgcctcccttaagccatgggagatccctgaggtcaagaccttatcatttgatctttgtagtattagtgcctattgcagaatctgacatttcatagactccagcattcattgagcacctatgaaatgtcaaattcttttaaaacatggtttctcaaccttgactccattgacattttagacccaattattgcttgttggggaagggtggtgtcctgtgcattatgaagatttagtagcatccctgacctctacccactaattgtcagtagctgcagtcataacaatcaaaagatgtctccagacaacatcagatgtcccctgggaagcaaagttgccccgctgaaaaccactgttttaaagggtttgagagggagaatttacattttttgggattaaaaaaaaactagtttttaaattctctctcctccatatgtatatatttacaatgtagtatatttgtatatatacaatattatcatttttaatttttttttttttagagataggatctcactctgtcccccaggttggagtgcagtggcacaatcataaaattcaatttttttgaattttatgaatttttttgaaagattatgaatatgtaagagccatcctgcatttataaaacaactttcagttttctaatgtcctttttgtcctctcaccctccttcccagagaacaatatgcaggtctttgctcagaaatcacaatcgcaaatgcagtctgtgctgacacagaagacatctgttggagggggagagatattttcagcctttgcggagatctgggtcttctgctattaaccaatatggaccaggttctccttttgtaatgggactgttaaagaatgttgctgtctccagtcagatgacgtcaatggggatggtaggtttacttctaggtagatctagtttaagtttaaaaggagtgcaagtacatacaagagcatactgcagcctcaaactcctgggctcaagtgatcctcccacctcggcagagtagctgggactacaggtgcatgccactaggtctggctaatttttagattttttatagagacggggtctcactatattgctcaggctggtctcgagttcctggctgcaagtgatcctcctgccttggcctctcaaagcactagaattataggcatgagccaccacactcagcctatatatgttttaggtatataagttttagatataattttaccaacatacatgttatgtgtatgtataataaacatacacattcttacagaggagacatttggctgggagtgctcattgtagtctttttttttttttccgtgggaatcattatgactccagtaagttgctcactaaatttcatctgtcactgtgttcccgttcagatacaactaaagcctattgaaattgatttttgtgtcagtaacagagcggggattcagtaagaacctgaaagcttccctttcattactagtctttttcccccatattactttagatttggtgggccctaattatattccagtcttttccctgctgacatttcttttgttttaattaaaactgctggaggtttgaggacaccgtgggagagggtttattcatcaacagcccaaataaagagccaaatgggtcccgatttgtgttactgccaccccaagaatgatagctgggaacactgtggtcctttgcctttgttttttctcatgacaccagtgtggtcctttttctttctgaacaggagactgctcctgctgctgctgcagaagtctattaagtgaatgagacaggactgtgggtggactggcttcctattgaagccatacattaggcaaaatgaaatgcagcattgcctttttattattattatcatctatttcccccaacccccagcctatcgtgtctgtggtccaaagccaaccctgcccactcccaatcacctggttgtaaatctcagacaataggggccagcttcgggctgcatttggcaaccctgtgcagggccaggggagaggatgtaatatatcttctttatctgcagctaggaggtgggatggagtgagcaaagagtctgccagaggtcctgaggggaaagacagagttgcctcataaagtagtccttagagagggagctattgatttgaaatctttaaaaatgaaccctgtttctccaagaacagttgcatcgtcctacctctagttagtaccagctcgggaaaagaggaggcagaggtgaaaggatgttggcagggcagcgtctggaccttgcttttctcttgatgcatctttctctccctgaccctttcctctggtaagctgttgattatgacatgcagaatgctaatgtctctagtgagcctccagggcctatttcagtgacctagttttcttagttaacacttggaaaagaaaacaaaaacagaaccttgttgagcaaaacactcacatcagatcacatagctttcccctccagttaggacaccgtaagccattcttatggtcctcttttttcttaagcttctgacacgcggaagtagacatttccccaaattctatcaagattctcccaggtgtagcccctgatggatcacaggaatctctgttcattgtgatttgtggcaatttacaaggttcactaggcctagaaacttgatgttttccagtgtgatttggcacctaccctttacaagacgctgtcccaggcaatgttagaggattaaacaggtttaaggtggagttcctgcctttgaggggctttctgttctagtatgtagcagccatgtgcctggaggactgcgttttaagggcattagggacttagggcacccagaggagagagaagtgggttccaatacaattcacacaggctattttaagttattaagggctatacaccctcacatttaactttttccaggttgcatcaagaaccttttttgtgtcttcagagggttattgacccttctactaagttcatgtatgtaaaaatactttttcctggattctcagatttcatggaatactaaaatctcactctataaaccccccccccaccaaaacaaaacaaaacaaaaacaacaacaacaacaaaaacatatggttgttaacttttaaaagttaaaaacatttcattaatgggcattttaacaccaaaaataagaatcctgcttaagttgaatacctcttgttttctgaaaaaatcaccactgggtccttatttttcaccttttactggagttgtatgtaaactttaccttggactagtgttcaggtaccagggttttgaatgatgtttatagccccaggtgccattcttggttcaggggatagggaaggctattgtgctgtgtggggaggagtgggatatttggagaggctgaagagttggctgcatgtacatactttgtcgccatcttttgagcccccacacctaggggggttagtcctcccagaaatgaatgtatgaaagccacagatgagattgggcgtggtgactcatgcctgtaatcccagcactttgggaagccaaggtgggcagatcacttgaggtcaagagttcaagaccagcctggccaacatggcgaaaccctggctctactaaaactacaaaaattagctgggcatggtagtgggaaccagtaatcccagctacttgggaggctgaggcaggagaatcacttgaacccaggaggtggagattgcagtgggccgagacagcgccactgtactccagcctgggcaacagagtgagactccgtctcaaaataaataaataaataaatgaataaataaacaaataaaaaatttttaaaaagccacagatgattgtggtaattctgtggtataaattagatgagagccagtgagagctttggttttgtgctcattttttgggttgagaggaggttactgggaagtgtgttcttggcgcaaggccctggcccagaggctggctcgtctgcttttgagttctcgtcacccctcatcttgtctgcctcgtcactgctgtcacttcagctgtgcgtgtctttcctgggtacaggcattaggctccctgccacggaatctgcatacattaactattgtctgctaaaaattgtgactatttgatttttttccctttaagcatccattttgatttataaactgagccaagctggcagccaggaagactgaagaatcctagtttctaacaaagaaaaatgaaacccagtctcttcttccccacttcatgtctgtgagcaagtctcagctttcagttggcccacccctgaacagtcttgaaagcaatccattttctgtcactcagaggtgccaagcaaaggaattcacagtgagtggtgttgagatggagagtaattgcttgggcaccatcctgagtcggtaccttgctttacctctgccacaagtctgggagccataaagtctgaattacagttctgcacatatggagagcagggtttttaagccaccaacgaatggcacatgtaggccaaggaaacacaaaggctccatttaacctggggaagacttaggaatggacatcatgccaagtatgctctgtgaacattcatgttacttgatcataaggatctttggagtcttttcataaagttgtcttgtctacctctttgcctcaagacatgttgtatcaaggaaaggtagcattcctaaagatgtccagatagatattaactaacctttagtctcaaatgggagtggaaaaccagagttcatgtttgccatcatcatgacagctcagaagtaaagctaaaaccaatttctggtttctctgtgatctatggaaagggaaagtaaactggtctctctgtagagtttaaaagaacttcatccacttaaaatcatcttccaggtttttatttatgagcaaaataattataattcctgcttacaaccccaccctatctggtcccatacactctgtggctggggaaatgtgggggtaagggaaacagatgtagatatgtggatggtaccaagaacccaaacgcaaccctcaaatttcatgccttcattcagtctgtttttcagcaaatatttgctgagtgcctgctgtgccaagcactatgaaggcacaagggaaatacatatccaatctattcccaagtcctcttcatttggcctcctgtccattcccacattctccaccctttccatcctaatccaagtggccatcatccttcacctttctccaggaaggagcatgaccttgggtgaggtggctctttggctaagggccattcccagagagggacctgacagagttgtcaggtacttcagtctgtactcgagaatcttggtggcacactgcagcatctatgattgatacacagatgatagatagatagatagacagacagacagacagatagaataagaacaggtgagccataaaacaacagctgccattactacatattctacattctgctttttttttccattttgatttgatttattttcatggttctggtgatgcgtgttttgaaaaaaaaatcacagtgctggttatgatcagtggggttgggatagtattctgtggaaacacaaaggtggagtactcatttgcaattaggaaattgaagacgacttcctcaataaagtggagattaaatctaaggtagataggaaggagaatgagccactctctacctgtgtgtgagcttcctttggcaggaggatgaagacagtggggggaatgtctgaattttcaacaaagatggtttgcttgagtgctttgccagaaataaatgtatgtgggtgacctagaaatgaaagtattctgtcttccaggctagccttaggctagcagctcaaaaaccctcttgctcttccttagaaaataacaacaataacaaaagtgaagcttatgtggctgttaaaacaaaactgttgttttctcttgcattcattttagggaggagttgaaggagtagggtattgtattaatcgtacttgagtgatttggatttcacctcgatgttgaattattttacatagaacaaggatcagcatagtttgttgcctcaaaagtgagggagaagaagggaagaggggagcagagtaggttcttaagtgtgtctgaggaccaggctgagccgtgaccccaaggctctgcctcccttgttttgatgcctttcttgttcctttctggtggataggctttttatgctttaggacattatctgacattaggcttggggtcctatcagaatatcagttttacttttctagatttagcatgttcactagcttttgccattattggttatttctgtaggaaaaaaataattcagttcatccttttattaaaaaatgactcagcaactgcaatctgataggacattttctctaattttcatggagaatttttttaaactcttttatctccttttagaagttttttcttttcagaatttaatttttagttcttggttgcacatgtggtttttttttttcattcatacatttgtccattttagagatgggatcttgctgtgtttctcaggccagcctcgaactcctggagtcaagccatccttctgcctcagcctcccaagtagctgggtgtacagacgtgcaacactgcaccagcttgaaacatgtattttagatctaaatttagatggtgtctatatttgtattttaaatttctcttataaggaaaaataaattagaattggggtactgttacattttcccttcaaaattctattgcaataacatccccttcgttgcactgcccccaaatttaaaaaataaattattaaaaatcctatgtgaagcaaagatgactggttcgatatttagttccagttaagtaaaatattaaaagtttgttttaaaaattattttaaaagtttggcgatagaaatttgtgatttaggagctggatggtagaagtgggatggaggagaaagtgtcctaagtttagctgtgaagttttggcctgatctctaaaaggagaggattgggttaggctcttaggggccccttcctactcaattcatttctgattttataaagttacctctttaaaaactgtcttacaatgactgtgcctcaggttcctagtgagctttaggtcggctgactccctgccattccctccaagtctgccttaatctggatcataacttggcctgatgttctctggggatagaaaaggcagctcatgctgggcaagttccttcatggccctttcctgatcagcaaaatgtgacagctcagcatccttcctgctctagcgcgtggggatacctttgcctgggagtgatctgaggctgctaattgttccacctccaggatctcatgtaagcccaaactgccatcccaaggtgtatttttcagttagctgtcagacccactgagaactgctgtttcagccgggaaatgaaatttaaaatttaaagtgttgttttcttttccagtgttaccttccatcattttcatagtggctacttaaaaaaacaaaaaaaaaaacaaaacaacaacaacaacaaaacaaaaaacagtagcaacaacaaaagccaagtatactaggttttttaaaagagctgatatcttatttattccaacaagaactgcccactgcctgtgttcgaaatgtaacacacgtcacttttatcccgcctcatctctggccttgagccagtaccatgggctggctcagccctaggctgctgatgggaagaactaggtgttgaggtgtccttgtaacaaattattcactcaaagaggatttcctgcttcttaaggacttaaaaatctactgcaaagtctctcaaagtgcatgctggcagacatgcctcagggactccctcaggaatgaggggagtcgggaggcagagcagactagagttgggcagtcaagtccctgcttgaaccaagggagttcacttaaggttttatttggggaaaaggttgggctgcaaatggagccacaggggaaggaagggagagaggaaggaagaccagagagggagagagggatattaatcctttgaggtccttggaataatacacacagggacatgttcattgatagacagaggtgacgaggaatcgacaagtgaggtatcagaggacagagtactgtaattgaatctggaaagagagagtaagttgtctgaggagtcaagaaggcaaagggcatcccagaccaagaaaacataccatctgagaggcaagaaacaataaagtacatttacagaagcgcaaacagtttgttctcaaggtccacagagtaagagcaagtgggagcctaccaaggtggtatggcagaaagggggtcagctcttggagggccctgcaagccgtgcccagtggtttgtctgtatcctgttacaggtaccattaaaataatttcaaggcaaatcagctatataatatcagacagaccctctgtatttgcctacgtttcccctaccctctttcagtgttttagcagatgaacagccattatttaagacatgatttatagccattactttaaagtccactgttggttacaaagctgttgattcctttgcaagggtcatcattacggcatcacagactcaaaagaggacgctgttgctacttcttccttgtgcaagattgactcatggtttgcaggaaaggtagcgttgctgctctgcaagaaagttagtgttcctggttctgtagcagtggcacttctctccctatcaatcttgtggaaactaaatttctaaatgctgcttgggatggaaagagttggtagtgctgatacccactcactgccctctctactaaccactgagcccagtctccccacgttttgtagatggggaaatgagggcccagacacagccggtggtcatgggcagagcctggacaagaactgggcctctgggattctggtccagggctctttacaaggtaacacgccatcctctccctcgatttcaggaaagtggaaataagtgtgaggggctgtgtctgtgaccatattggattactgacctactgtccccttctttgtgctctttccccagtgaggaggaaaaaaagggcagcagaatgggggtcaaaagcggaaggaagcaccatcagaatcagagtaaatagatttttaaagctgagatatgtgagaagaaagaggacaggcagagtgggcagaagttaaagggccagaggagtggggaaaattaggttagtaagggagaaaagtagtagaaaaagggaaaggatttaagaacacaaagatataggtggtctcaattacaaaattgacccactaatgttttctaccacaacttttaaaaaatttgatccaactaaactagcacattttcaccaacttcaactactgaatctgaatcacactaggccaatcactttttccacaccacaattatacatgcctccttatctgttgttaattcataaacatgccacagcatctatgggggaggcccttactattccaggtactggaaatacatcgatgagacatggtccttgcctttatgaaacatacagttcagtagggaagacaacatttaaaattcaccagaagacaggaccatacataattacggccagcatctgctgacagctaatctgcatatgtcactgtcaagtactttgtatacatgatctcatatcgttctcactacaattctatgcattaggtattattattatttcagtttttgagatgaggaaactgaggcttggaaggttgaggggcttgcctaaggtcatgcagctaggttttgaacccagctgatcttagaagctatattttattgcctgatagcagcaataagtaaaatgtattttggaagctatatataaaattcatgtaaaagtagtgagtatgaccatctttgctgttgtctgagagtcacatgtagacattgtgttttctcaaggagcaaacaaagagaaaataattctcttctgagagtgcccccttggcgctccctactcgtttctgattttgccacgtggttgctgcttcactgtggttctaaagaccaaaagagcccaccttggggaagcagttcctaatgttcaacactgtctccttgatcacaaatttggattgattgctatctgttttagtttaggctcccttttaagataaagataaatgaacaatctcaggtgaattatagcagaatcatatccagttaaaaccatcacaggatattttaagaatgaaagaaaccaaagtttcttcatctaccgagtgttttctaacagagagatacttgtgtattcttccacgcaggcctagctccccttcgacataaatcctcctctcatataagctcttgtcaaatgccttggagaggagttagaaccaaattgttcaacattgcattttttatttgacttgacacccactgtgaaaataaacaaagtgactggggacgttttacaaaataaacactaagtagacatggtgtttctgtgtgtgtctgtctttctctctccccccattgacatagtacagcactgatccaagcaatttttctttattgttggaattgaatgctactattcatcatcagaactaaatcttttgttattattttttcttcacagggtcgtcatgtcaaaacgggccagcttgcagccatcaaggttatggatgtcacaggggtaagtgtctttattttgccatctcaatagccatgcagatgctccttgacttatgatgagttcacatcctgataggcccatcataagtagaaaatattgttaagttgaaaatgcatttaatacacataacctgttgaacatcatagcttagcctagcctaccttaaacatgctcagaacacttacgttagcctacagttgggcaaagtcatttatcacaaagcctattttataataaaatgttgactatctcatgtaatttgttgattactatagcaaaagtgaaaaacagaatggttgtacaggtacttgcagtatgatttctaccaaatgcatgttgatttcacaccactgttagtcaaaaaaaatcgtaagttgaaccattgtaaatgagggaccatctctatatttgtaatagagaagttaatgatagaaaaaaattgttttctagaaaaataatctccctaaatatctaatatctttccccacttgtggctaacataaggaagagtatgcagtagctgactgaagagatcatgggtacatcactctaattaaatttgatacctacacactgccttatgtagttagagtgaatactgtttgccaataatttacataaacacaaccacagatatttgcatatgaatgcagaacaaggatgtgaaggtattaaatgaataatactgagattatacagaagaaatgagtcttaactgttttcccaaaggtctgcctaccactggagtagacaggagcttggatggctctaagatcctagtaggatatttaacatgaatatttcccaaaacaaaatattactgaccaaataatcacaataaacacaaattcttatcattatagagcaacaatgaaacaaaatttctgcctggataatcaaaagcaatctaagaaatagattttattttaaatacaatctaatgttttcgatccttttgctaagcctacttaaaatattttaatgccttttcaagagtacacagcaaaaatctgactcgaaaggattcactggacatcaaaggcatgttaataattttctgttgtcctggggatttttctaagatgtctgtctgctgtacatgaaagctaaaagaccaaagtcttccattcagcccagaagttgattattcaatataaatagacatagaatgaatgagtcacacaaaagaaaataagaaaaacaaataagaaaaaaataaataaataagaaagacacacagtatgtctgtatgtcaaacttcaacccataccttttgggctcactttgttaccttagataagtatatgttatgtgatagttacctaccataatacacgtttcactaattattgtttacaccacacattgtactgacttattattgatctaaattcctctttaagttgtatatatttttgaccagtaaaatattttgttcctgtatttttgttaccatttagataaagtactaattctttttatttgtcttaaatatattatttaagttttaggtattacaaaagttcaaatttttagtcccaattagtttattaattcacctggcctttactgaataataaactgtatgtgccttatattaattcagtttaagaaaacgctaaataacagaggattaagcataatagaagtgtcttgctctcatgttaaaggagtgtaaaggtggacagcctagggatgtatgtcagtgatatggtagagtgaaggatgtttttatctttctgctccatcattctaatgcatggcctccacagttaaggttgctttatggttcaaaatatttattggatttccactgatcacactttatggcaggcaaaaaagggagagcagggggagcagaagggtacaaatgagccccttccagtgaaatattttctacttccatacaacattactacttacttctgctttcattgcctgtatctagctgcaagggaagctagaaaatgtagtcttttattctactaatgtgtctacttaaaaatccagattctatcagtcagaaatgaagggagagtggatactggaatggtcgattagcaggatctgacacaaaaattaaaatcagatactatcagtctctacatagaaacccattataaacgtgtaaacattttacaaagctccaaccacagaacaaatcagaatttgttttgcaattcagctgaagtcatactactgtattttccttggattgaataggatctctgcataatgagatgagcttggcagtttaacaattaatggttgtggaaggagtccaagacattcatgctgtatattaaattctattgtgtggttttgaagaactacagttgagagttccactgatgtcattaatcttggggcataaaatgtgtgttgatgttcaaagtatgactctgaacaatttaaagcctcacaagtagaaccagaaactactcaagaaccactattgctagaccaccttgcttggaattaaaagttacacagttatttttcccagaacatgtattttcagcttaaggaatgtcagttagtctttctaaactgggtttcattaagcatctaagctctacagaagatgatttgagagactgccttctcagttcttccaaggagggtacagaggtaaggccattttacatgcaaaggagtgtcaatccattacatagagtggatgctttatagtatttaggcttaattctcttggggaactcctattgaggagggctagatagtttttctgtgattcagtcatgtcattgatgattatttaaccactgacttttaacgaaggcaaacatggatgcacatcaggaaatggttttcttatttttgtggtgtctgatgtggcatcaagagacttttgtatcacccccttacacatcacagtcaacataagatttcctttgtgaaactcacgtggtgcctttagaagacagtctattctattttgccatgttgtctattgtgtattacagaatgctgtaaaagcttcttaccaattattataattgtactcattatggttgctctgttaaaaaactgaaatgaattctcaaaggtcgtctttgttaattacatgctatgacctactacaaagttactatagtttattgttataaaactgataaagccataagcttgacatcaatttttaaattattgtttttattctatatcacttcctttttggtataaaacagccattgagagaactggatataatgcttatatccttccatttttagagctgaaacacttccaaatttgccaacatttgcttcagaatttgtgcttaaactcagagtaggccttgaagatcttatagtttgaaatcattatggaaatttccccattttgtcacagtctgggatttacctctcagctggatttttgcgctctagattgacctacggcatctaggaggagctggaccctcccaggtagtgtttcttaaagtggaccatcagcatcagtgggcagtcagcacctctgaagtactcatgagaaatgcaaattcctgggcctgctgcaggatttctggggtagcctcaaaatctgccttttctgtaaactcctcagagtgtcacacacatcaaaatgagagtaccacttttctagggtcttgtatttacttctttctggccaccaagtgtgaaggagctatggttttttgtggggttttttttttgataaccctgtaaataatccccattttcatttggataaaaattcctagtgtaaagtagtccctttacagtgacaccctgaagtgcatataggacttaatgaaatactaatattgtaagcttttgcctttacaatgactggttgtgattacactactcaggacatttggggttgtagtaccaaaccgccactcaaactgaatgaagctgaaaagggaatttactagcttgtatgaattaaaacaacaaaaacctcagcaggatgcagagaagtcacctaacatgatcaggattttgtctctctccatctgtgggctctgctttcgtcccagcagcagctgcaggctcatgttttcactacctcattgccattggtcccagcaaaggtgccagtctgaatatcagtggtccagcttggaccatgtccccatccctgggccaattccttactctccagtccacgcctgggctggatgcctggctctggaacctaccgcagggactgagagttggagagagttgatttctcaaagaaaaacctgagagttattatagaaaagagtgggaaagatgctgggtgggcaaaaacaggagaattctatgactataatatcatatattatagtgagtgtgttcaaaactgatttggtccttaagtaaagtgtttctctaattacattttttatattcctatcaaaaagaataataatggtagctaacactaagtgagtgattactacgtgccagaactctttaaaatactttctatatattaattcatttgatcctttcagcagctaaccaagcaggttccatgattagccccattttaggatgtgaaagccaggcattttaagtatcttgctcaatgtaacatggctgccaaaggaaggagtgaatatttcagcctgagcaatgtaaccccatcctttaagtctatcctcttaaccacattgttttcagtcttcaattcatgtagtgtttaatttcatgtgattcttttttcattgatttattcaacaaacatttactaaaatctactttatgataggcactggaaatttaaagatgaaaaaaatggtcttttgcctgctcacagtaacacaaccttgccctaaatatttataaataaagcttatacactttataacaaggctgtagaatgtgtaaataacgttacttgtaaagtttgtcggaactgtgaggagacagtcctcactgaggaagcccaggaggacagtcaggtgaggacattccagccaagaatacagccggtgccaaggcatgaggctgagagggcatgttctggaaactgcacatagcttagtttcgaggttaaaagtgccaagaaggcgttgatacaagatgaatctagacacattaggaggggccaggtcatgaaggaatttaatactgtgacaaggagtttacaaggtttttaatttttagttttctcagtagaacactttgatcaaatagacttagagaaaaacccaatacataaaagaaatgtaagcaggttttcttttcttttcttttctttttttaaaccaagggtgggagaccgtaagtcctggctcctttcctcaaactactactagagccaatgcaagagccagaagttgaacaggagagtaacaccgtaggattgcctactaggaggatccatgctaagctctgcttcactgaattcctatttctgtcttactgaatttctgtaggtgaagcttatgaccagcctccatctctttctgaagagtaaggaagtggtcttctcccagtagtagactgttttgcccattattaaagggctcagtgaatgcttgctgaaattgcacaaaaagaaaagaaaaatcttttcatcttgggttgtttggaagagtaaggtggacacattgttccaagtacatttggttctttcatcccaaagggaggcagttcagtggcataattaatagtatgcacataatattgttaataataataatgacgataggcacaggccaaaaaggggctaatactgattgtttatcatgtcccaagcattgtacttagtacttaaatgagtacttagtactcatttaatccttaaaacaacgtccattaggagaatactgctggtatatctattttacaaaggaattgacagcagagagcccaagaaacttgcccaagcctcatggatagtaaatggcagggttggaattcaaatcgagccagtcagggcatacccacactctccacagacatcttattataggatgagaaatgagagagtattgccagagcatggccttcagattcagagagagctgggcttatattccactcatctccttactgattgtgaccttgggcaaattttaacttttctgagccacagttttcttattggttaatgttgcaagcttgttttgggacttaaatgggatatatcttgtacctgacacataataggtcctcaatacatgattttaatggttagtgccagtaaggtacattgaatcactgaataagacagacaataggaatgaaaagattttagtgtgcattaaaatcctgtagttgtatattttgatgacagcctgatctgtgaactacgtgccaatttgtgttagttaattgctgatatgggtaaatagtttgcactcaccctatctttaccacctcaattacagagttgttagccttaccctgaatagtatgtagctgaaaaaaaatggcttactagagcaggatccaggaaagaaagtgaagctagattccagaggctgaaggctgaaatcacaagatttcattcattcatttacttgagaatgaatgagtgcactgtgctacggagtcatccagtgaacaagacagacatgggcactatcttctggaatcttatattttagtacaagacatttagcagttaaacaatagcagtcacaattctgattaacttccaagcagtgtacagagtatgaagagagaatttaagaagaaactgacctagctgggtggccaataaatgatttctgagaaagtgacagctatgtgagatctacaggacgagtagaccttcgttagccaagtgaaggggtaggggaggtgcacctccagatttgggagcttgaccttcaggtgatgtcagcaaagcttggggattcccatctgaagctcctttgccacagaggccctctggacagctctttgggacttttactttggagccatttatgtagatgtctttagcagacagaacagtctgatcaagcacatggtcaaaactttcaacagagaaaagataaacaaatggctttttttgtcttcctaataccctccacctttggggctattttcagtgcttcaattctgtatgctatacagcatgtagaacttggaaagcttctagggttctaaaaatgaacaactgagctgcccactccatgcacactttagcatctgtcctcttcttgcatacagattagacccttttggtggcttatgtgtgtctgggtctctgcgcatgttcatgcatgctgtgtgtatggcctggatgttgggcttgttgtatgtgtatgctcacatgttagatacattgcttaagtgcaaaaaataggcctgggggctactgtctatacctccaaactaataaaggtgagcaatagtttttaaaaatattttttacatcataatagtttatattcactggtccttttatttgtgtacctcaaagcacttgatcaaaattataattaattcccttagccccctagtggggtggagatgcctgtagatgacaaaattggcatacagaaactggggtgcttggaatcactgacggggctgttcaaagcatgatttccaatcaagttcctcagtagtggaacacaaggtctccttctgcaggtccgtcctttcctttatgctgccaacacttcccacctcatattcattcccctcttttgacttcactaggtcttctcttgttgagctctgttgctcttctttgatttgacttcctcatcagtattttgaatttctatttaatgacttgggaagttcagcttttatttttattcatttatttttcattatactttaagttctggggtacatgtgcagaacatgcaggtttgctacataggtatacacgtgccatggtggtttgctgcacccatcaacctgtcatctacattaggtgtttctcctaatgctctccctccccttgcccgccaccccacgacaggccccattgtgtgatattctcctccctgtgtccttgcgttctcattgttcaactcccgcttatgagtgagatcatgcagtgtttggttttctgttcttgtgttagtttgctgagaatgatggtttccagcttcacccatgtccctgcaaaggacatgaactcatcctttcttatggctgtgtagcattccatggtgtatatgtgccacattttctttatccagtctatcattgatgggcatttgggttggctccaagtctttgctattatgaacagtgccacaataaacatacatgtgcatgtgtctttacagtagaatgatttataatcctttgggtatatacccagtaatgggattgctgggtcaaatggtatttctagttctagatccttgaggaattgccacactgtcttccacaacggtcaaactaatttacactcccaccaacagtgtaaaagctttcttgtttctccacatcctctccagcatctattgtttcctgactttttaatgatcgtcatgctaactggcatgagatggtatctcattgtggttttgatttgcatttctctaatgaccagtgatgatgagcatttattcatatgtctgttggttgcataaatgtcttcttttgagaagtgtctgttcatatccttcacccacttttatttttccttcattaaaagttctttctcatttgaagcctactgactttaataagctttcaaggccagggacaggaactgtgcattatccatctttgcaccccatgcagagcttgctaaggttgaacctggcactggcactggcacctagtaggtgctgcattatgtgttatatatgtgtattatatgtatatcattatatatatatacacatcattatatataaaatgatatatatcattatatatatacacatcattatatatataaaatgatatatatcattatatataatatatattataattattactaaattatatattacatataattataataatatatataatttagtaatgggtttgctgggttgagtaaatgattattgaatgattatatgaatatgtattatatattttataatatatatttataattatatatttatataaaatatatatttataattatatatttatataaaatatatatttatatatttaatatattatattaaatataatttaatataattaatacactaatatagtaatattttatatattaatatgtaataatttaatataaatataaatataaatatttaatatttattatatattaaatatatataaaacatataaaaatatatatttaatataaatatgtaaatatataatatataaaaataaaatatatttatattaaatatatgtaatatatatcaaatatatatttataatatataaaaatatgtatttaatatataatatgtaaatgatatgcatataatacatgtatataatatataatgcatatatagtgtatacaatgtaaaaatctatgtagagtataaatgcatatttatgtaaaaataaatataaaaacaatattaagattagaaagccagttgaaggaaaagcaaattgaaattacagggccacagagaacttgctagttatttttcccaataaccaaagccaaaaggggggaacattataaagtacactgtttatactatcagaaaaaaaaaaaaaaactcattccaattcctgtgggctgttacctgaattgtaaatctaggatccttgaagatataagccacgccatttatggtagactttagccacatgagtgacattattgctaggtttaaaacttgtttacttctgggttacttgagtttgggtcttgttaattcgtggttttcttgggagtcatgcctcagtgcaggcttgggtatgagaaagacatatgtcaaccttttgttatctacccctttagggaactccacttcattgtaagagaaagcaggttagcctactggcaaagaagagccctgcacagtgtcagtctcgtggaatatcctagttctgacacttcatggctctctgaccctggacatattgcttaatgttctttattctacatctataaatgtggataatgccacttctctcacaaagttagtgtgagatgtaaatatattaatcattatttataaagggtttcagaacaatatgtagaacacggtattctgtgcctattgttgttattattaccaggtcttttgcagacaatttttatttttctctttatggcaccaaaagcctccaaagtagaccacatgctacatcctctccagccacacgaccttggcaaacactttctctgccaggaaaatgtttctatcccaatcacactacatcacattttctctttttttcttcccaattgggtaactttcacctagccttaaaaactcagcttaaacttaggtttcttgaggttaattagatcagctaccacatacttctcatggtcgtaattttgcatatatctcattctttgattcatatctgtgtcttccactaaactgtagtaagcttcattgtagcagaacttgaatctgttatgcctattgtagtatgattatattattgacatttacaattatgactggaatatagtaggcacttagtaaataattcttttttcttctttactttttttttgcaactgttattttagactcaggaggtacatgtgcaggtttgatgcttgggtatgttgtgtgatgttgaggtttgtgacaaatgattctgtcacccaggtactgaccatagtacctaacagtcagttttaactcttgtccacttctctccccagtctagtagtcccagtgtctattgttctcatctttatgtccatctgtacccaatgcttagcacccattcataagtgagaacatgcaggattttgtttcctgtttttgcattaatttctttaggataatagcctctagctcaaccatgttactgaaaaggacatgattccattcatttttatggctgcatagtattgcatggtgtatgcataccatattttctttacccagtccaccattgatgggtaccaaggttgattccatgtctttgctattgtgaatagtgctgcggtgaacatgtgagtgcaagtatttttttggcagaatgatttgtttgcttttggatatatacctagtaatgggtttgctgggttgagtaaatcattcttgaatgaattaatttaacttagagttaacatatacagcaaatccaggtgctgcctgcagaatgtcctggcaaagtcctatcaatgctaaaatgaagaggtagggacttagacaactcgttggatgactctgggtctgtttccttaaaactatttgatgtaatagatttattacatctaattatttattacaatctattgtaattatttattacaatctaatttattacagtctgttagatgtaatcgatttaaggaaacagacccaaagctgcataacttgaccctgagataattttaggtgatttacatgtttaattctcatttaattttaaatatattttaacatataataaactgtgatttaaaaagcagacctcaaactgtatgttatacaccaactttgaacacactggaaaacgccagcctgttaatttgtgctgctaggttaccctattcatgtgcagaatggcattgattgtgaagatcctactaaaatttcaaggcatgctcttaactatttcaactatttatcttaggaaatgcagatttttctccatcctatagaactgaaagaaaaatgaaaattaataagatattagagttgatgtataactttaaatttctttctaattttgtattcactagaacaacttcttgtcattgactaattgtataagtagatattgctttaaacaaataaatgtttactgattttaaaaatttagtttttgtcagctatatatttgcatcctgaaaaaaacttctattgcagggagggatttcactattacaaattatttcagaagctttttaaaaaccacattctatatcatagtgacgatcccttcaaattctcgtagcctgtgatcctttaatgataaagtgtctcctactttttgccacattcagtcaatgctgaaggtgagaatgacagataacacaaacacctgcttaatggcaacagctgctgtgaaagcagtgcagatgagcgggagcagagatggttctagccagtgtccacacatctatgggatagtggcatttatgaatctatacaccttatacttctctctagacttcttcctgactagtctcttagacttgctgtaggaattgcatagtttcattcctctgccacggattgagagttaaatgttgggcagactttattacagagcatataactaatattaaatgttttattccatttttaaatgctagcatatcataggcacttaaagtgtgttcccctgtgtaataaatatgcaacttaaaatcccttctttattccttgaaatcaatcataagcaaatattattgtatgctaacaagctcctttaattggaagaccaaagtcagggttctcttctgccctggcttaagatgctcttaaacgcttccgattaacgactttggttttggacaccatggataattgcccttcatctgactagtagttttctgtaaagaattaagaatactggctttggagtcagagaaatctggtcttgaatctgaggtttaacatttaaagtatgagtgaacttgggaaagttacttaacttctctgagactcattttactcgtttgtaaaataggatccagcttcatagctgttctgagtgctcaataagatagttcatacatacctcctggtacacagtaaacattacatgaggttttggctttggctatgttttatgaccacatgatgacaatcatgttgccatcagaggtggtcagtggcttaaaagcattaactggaattatctatttccttgcatttgaaaactgcctatcttcccatgatttctcatcttctagaaggtcaatcccggtttctcacatgggggttgaagggttggttctctggcaagcagtaggagagggccagtctcaaggcataagtgcttttcgggcctctgcttcttcatccgatttgctaatgtccccttgaccaaagcaagacatgtggctaagcccaggttcaaggagaagagaaatggactccacctcttgatgcaggtgggacacatatcatggccattttctttttcagtctaccacaaacactaagcaataagtagatcctgtgatcttgagaaataatattatcttctttatattaatactaaagctacatttaaataagcacttaatcatttctaagccctgagaagtagcttatataggtattcttattcctatttatagctgaaaatgactgacatttggagagtttaaatgccatggctgaggttaacataatgaatatgactggatttggaagtcatctgatttaagtaatccttcttcctagagtaccggacttggcttattgaagttactcttttaaatgtgtgataatttggtaccactactttatttttcattattgcccagtggtcattagtttatcagagggcttgatccttgtgcttaatacttaagatttggaaatagtacatttacaaaataatttacaaatagaggctattcaaattctcgtagcctgtgatcctttatgataaattgtctcctactttttgccacattcagtggcaattctgccactgtgggtggcaattctgataggtgctacaaaggaaaagatacatgatgattcatggggctataactttttcacttataactttttagtttaattctagcctcccttgctctctttgcatttttggaaagcattgtaactcatctcccttgatgggccatattgtgagaggctgaactctttgtgacatggttaaatgagttcttgtctcatctagtaacggtcttccttcctatttcactgaataacttactgccatctgtgccctagactaaaaatctggataaacagtaggcccaaaggcctgctaaattgcatgctgacttaaaaagttgcgtaagatcaaggatttatattttagaactacctaaccatgtcttacagtggttccataactgtgtttggaaacagtgcaatttaaacctaaaattcaagtgatttacattttggccttcctgcccttttatttatttattttttggttatgtagattagtaataacatttactttgtagtacactttataacatacatccgttatctaagtaccacaaaatgctgggacttataatatctttatctcattataaatgagaaaacttagggtccaaaaagataggcaactttcttgggattctgcagccagaaaggaatggtacccaaactcaacatgcaccccatctgcccaccctcttctttctgatcccagactcaatgcatatgctgtccttattgtcatattgcctcagtttacctttgcaaaatgatggagaatgtactgactttattctgacctccagtactatttattttggatttaattacatagtgccttctgttgttatttaactgttttataagctcttattttcttaatgacatggtgagctttttataggcagtccccccctcccctgtctttcccacatcacccactatcctgctaagaatccaggaggcaagcggtaaatacttgtagaagcagcctgatttctcactaagaatgactgatgctaagattgacaggctgcagttggaaagtgatccgtgtcttttattacctcacgtagttgcctttttaatggaagcagctgtcgatgctgtgctgcccacagaaaccctcaggtcgtttttctccctttctatttaggcttccccaaagtacatccgctcacatcctacattcgtccacaattatttggccccatacagcaagtttaaaaatagccaatgtgcaccatagtaagacattggaggtgcgctgtagggacccttcaacaagttgagggctggcgaaggtcattctcttcacgacctgcagtgaaggcgtggggagtttctgatggctgctaagaagaataggtggtcagcagtgtgccttcccctgtctcgccccttgactcccttccccactgtttcggccacatgcttctccttagctcagcatcccaagcatatattctattttgagattacctagtcttcagcttagttaagccatgtgatatgtaacatgcttttacttctcctaggtttgcaaatcccctttgttttttcctaaagcttattttagtaaataagcatggtcagcaaatgtcagcacttcactattctcctcactctattcttacctgttccttctaacatcactaatgctgctctgggcattgggctctttgtagttatttgttcttttagttgcatttattcacaggcactgcttggtgctagggatgttgtagagaacaaaacagggaggattcctgagtttacggttcttaccgactgataaggagaggagaccttaatcaaatgataaatgtgggtggcaattctgataggtgctacaaaggaaaagatacatgatgattcacggggctagaaccaaactgggcagatcagggagctttgctggggaaggaactgtagaactgagatctgaagatctggagaggagagcttacaatatagggagaagagagtcgagtaatgggacatacctccataccaatgtcaacaaatacagcaggtatgtgaaggagtgtaggggctatgaccagatgcagtggggggacttgacattgcctgagagaattaaggaagagatccctggtgaatgtcgattaaactcaatcaggaatggtgagtagagcttatgtgaagaagaggtgggggaaagaagacagcacacgagagactgcaggaagtcccagtaatgcagagacactggaaggaggcagtgcagccggagtggaggagggtacagacaggggacaccatgggtagtttttcaggtcatgataatgtcacatcttgcactcagggacagtcatagcttactgctgcacctaaaaaattatcctgaggtagaaactttctcccccaacctcaacaataaaacactcttctgcagtccaaccaatgtgtatacacatcaagaaaataaaattatgggaggtcaccatctccaccagcactgccaggacctctgaaaagggtccaggttggtggactccaaatcaaaattcatagtgaatgaaacctgaatattaagaaactaactctgtaagagagttgtctctttttacatcctcagtaccaccacatttccccctttctttctaaggtgagtttcctgaaggtgaggtgggtactcctgctttgtgaacttccttagatctagagaacttacctttgctccttttcccatctgactttcatcatcttcagtcaggtacttcaatgaaaggagccttcaaagaaaatgaacctaacaaaatttaaatctgagcgcccacggttttaatatctttcattttcctcaatctttcttataccagatagaatcagtaatagctacttgatggatgtagttcccagaggcctacagtgaattttctctcgatagtctttctaccttgatctcttctaggtgaagagatgagggattgttttggatgtttttgttttgttttccaagagattgtgctatgccagtttgctgtacaaaaagaagagtctcttggacagccaatgtattatgttttagaattgttctttgccctcatatgtaataattatgctcatttgtcaacaaggaagaaaaaacaagaaaaaatttagatggtgttgaagaacagaatcctactaacaaccatagattttcatgacagaatttttatattgttctcatacaggatgaagaggaagaaatcaaacaagaaattaacatgttgaagaaatattctcatcaccggaatattgctacatactatggtgcttttatcaaaaagaacccaccaggcatggatgaccaactttgggtatgtactgccgtccaaatttgctttatttacataaaaaacaaacacggccaaatggttcatttttctatcctcatgacaaaatttgattaactccttctttaaccattagcccccatgatgtccgtaacatattgttttcagggttttctcccatttccttgaatatctgtcttttcaggatctctaaatgttccttctatcccttaatatggaccatccccaaagccaattgttaagttctctgtttttttttttttttttcactaattgacaaccttttattgtgttttattttaggtgccttggtatttacattttatgaattgtatcatttattttgcttctttgagttaggtattattctttccctaatttcttgaatgatgcaactaaggtttacagaaaaaatgaataaactgttccaaagtctacatagctagcagggatggatctaggatctaaccaagctctatgcgattctctgtctatcgctgatgagtgggcgactgaaacataaactttaactctgtaagtaaaatacctaatacagtgtctggtaccaagtagggactctgcaaaggttgttttcctttcatgtttcccctagtccacttaggtatgtgccacagtcctttatctttgacagtctaagaggcagctctaattggctgtcccaccaatgagtttactgtgtttgataccaaagcctgttgctgctgtgcggagccttcctggtttctgtccttggaacttttattcacttagtccttcagcaagattataatgctgtattggtttggccttcccttgccaattttataattacctccctagtatgggcccattcagtggaagcctggactttacaatggcctcctatgtgttgatctacttttctttcactctttcttcttccctctaccttctgtccttccgtccctccttccccgcttcctctctctcaatttctgttcatcccacatgtcgttgttatattaatgcttctaaaaatacctttttaacctcttactgtcttgctcattttccagaggttttgtatgtgcctaacacacaaaatttactgaattagcaagagcctactatatgccaaatactgtgctgagctgtgtggatccagtaatggctatttcatggagaattcccaaagtactcagcctcgggcagaagtaactattttaatgcatcagacatttccaatccagtggggaagacagaatatagacagtgaatgcaatcagtgaccaaaaaagatataaaaatgttagctcataaaactaacaagattttcatgtcatttaatatgagtactcaatctttggaaatgaaaagaaccattgggattttttttttccataaggctcatctccaaatttaaaagaaaaattatttgggggtaaacacattttatatagtttatataattctaaaaaagttacagtaggttttaattgtggcctctaaatgtataatagatgtaaatatgaagattcaacatataaaagtagtgggagaaaataaatatgactggataatcctaaagagagatatatgacaacaaagggatacaccataaaatataattttgatggacttgactatatacatgttttaaatgtcttcttaacaaaaaacataaagtaaaaatgcaaataactaagtaaaaatattcattttataatataatgagcaaagaatttagcagccttcagagatgaagcatttttataaatcaataggaaaaacatgaaattactaatagcaagattgagttaaggaaatggttacaaccaaaaaagtaagcaatatcaattatcagtaaagttgtattaaaagcctattcttactaacaatagaaatccacaagaaaaaaatagataccatttcttgcctagtaggctgtcaaagatttttttttaattataatgtctagaatggacactcatacccactgctcatggaatgaacactggtccaacttaagggcagttggcatacacacacacacacacacacacacacacacacaccccttccaaagcaaacaccttacttttgactccctattttcacaggcaggaatatgtcctaaatcaggtcacttatttaggtaactacataaggatgtatgtagaagttaaccaatagggagtcacttacgggacattgcagacatttaaaatgatgtagctctgcatttataaatggataagcattaacaattttagtaggggctgggtgcgagggtggctcacgcctgtaatcccagcactttgggaggctgaggtgggtggatcacttgaggtcaggagtttgagaccagcctgaccaacatggtgaaaccctatctctattaaaaatacaaaaaaattaggtgggcatggtggtggctgcctgtaattccagctactccagaggctgaggcaggagaattgcttgaacttgggaggcggaggttgcagtaagccgagatagtgtcactgcacgccagcctgtgtgacagagtgagactctgtctcacacacacacacatacacacaaaaataaaataggactttgtaaagcctgttgaagaggttataattagatatagtatgttttcatttttgtggaaaaaatacgtagtaacttggtggggatatctgatataatgtatactaattgtgttgaaaatatttgaggtagtaatttcagtaatttcattttaaaagcatttttcttttttacatctgctttttttttctctaatctttctcttcagtacattttttttagagacagggtcttgctctgtcctccaggctggagtgcggtggcaccgtgatagctcactgtagccgtaaataccatagctcaagcgatcctgctgcctcagccttctgagtagctctgactgcaagagcacgccactatgcccagctaatttatttatttttttgtctcactttcttgcctaggctggtctcaaactcccagtctcaagcaattctcctgccttggcctcccaaagtactgggattacaggtgcaagccactgcacctggcctgaaatttctcttaagttcagcatctgaaccctttctgctgctgcttttgttattgctaccaccgggctgttcttgctcctcataaaagactgtctgctctctgagggcaaggattgtgtcttttgcttccctctgcagcatttggaaggcactgggtaatatgctgacaaaatcattggtttatgaatgaaaattatattgttagaacaaaacctggttgcaacaggtacttttgagagctcagattccctgaggcctgcagattcaacaggatatgatggggtggcatgagttaacatatctttgtgtttccaaaggacttctacattgtcaacaatttagcattttagcagtgactctgaattgccagaagctgcagcagatgacacgtagagaatgatagctattatcctccagctcattatcagcaccctggaagtcccccttgctctccctctcaatcactgccacctcaaggaaaacgggtatcctgactttttttctcccagttgtattaagatataatcaacaaataaaaactgtatattggctgggcatggtggctcatgtctattatcccagtacttttggagaccaaggctgggagggttgcttgagcccaagagtctgagaccagcgtgggtaacatagtgaggcctcatctctaccaaaaaaattaaaatttaaaaaaaaagaaaaagaatttgtatattgttggtgaggatgtagagagaagggaacccttgtatgctgttggtggaaatgtaaattggtacagccatgtggaaaatactacagaggtttctgaaaaaattggaaatagaactaccttatgatccagaagccccacctctggatatatatccaaaggaaataaaatcagtatctcaaagaggcatctgagctcctgtgttcattgcagcaatatttagaatagccaaggaatgatagctattttatagttgtctgtagaaaggtgttttctttggtcagggctatggttctcaatttaaaaaaaaaaagcattaatgtagatttataaccatctcccagcatatcacctgagctagaacagctatttctagatgagccacacctagctattaatttcattcattttgtgagatgggccagatagaaaagttggttttcatgttaagttgaattattaaaattggggtaattggggtgtttatttacgaatcgttggttgagggaaggagaggggtggttaatagggcttgactctttttcgcccttttgcagatcctgagatgttttaagttggaagaagaattagtcatgataaactttgctgggtccagtgaagttaattgactttccccgggcctcaaaactcattagtggatgatgcaggaccagattgcagacatcctaaaacataacactttagcttggttggaagttctgtgaaagccccctggaagtttttgttaaaaactgagcaaaatcttcagtccattttcagataggtacttggagaaagcagcacacctgctggcatctgcatggtgttaatgggaggtattgtactctggaaatgagtcacttcccactagttctcaccctggccaattgctcttctcatggagatggctgttgttgctgggaaccaaaagcctgatgtgtatgtgttcatttatttactccccagtcattcattcattcttccatatatatatatatatatacacgaacatatatatctccatatattcatttatttgtctgtgtgtacatacatatgtatatgtatatattatcatatcatcatatatatacatggctagtatagatacatatatatactggctaggcacaaggcactcttccaagcactcaggatataacagtgaacaaaatttatgaaagtacttattttaatgcagcttacattcttgctgtagactacaaacaataaacataataaataagacaattacagaggatgctggaagctagtaagtacctggtggagtactaattgggaatgcaggtaagggttgcaatgtgttatggactaaacatttgtgtgcccccaaaattcatatattgaaatcctaactttcaatgtgatggtattaggaggtgaggcctttggcaggtgatcaggtgatgagggtggagcccttataaatgggattagtgccctcataaaaagaacccagagagctcccttgctgtctttctgagaagttaacagtctgcaacctggatccagatcattcagggctttgcaggccattggaaagacctcggcttttactctgcattaggtgggagagccatggagggttttgaacatggagtgagggggatgggatctgacccacatactgaaggggtcacttcagttgctggcttgcgaatagaccagatgggtcaaggagagaaacaggagaccagttaggaaactgttttagtaagtgaatccccttcctgaacttgatgaaggggggatctgcaagtagtgagcacttccaaactggaccacatggggaggaattctgccatcacattcaacttaccccacttcaattaaatgcaattaactgcaggtaacaaaatgtggaagttacagctcctacattctgccaggtttgaaggacaaagggcctagcactcgtcagactcgcgtctatgcagagggctgctctgaccatcccttctagcaattgtctagtagcttctttcttaccaaagatgaagataaaagctatgaaaggcctcataagggcaagagcgtcatttcttttcctagttgattgatgtggtgacaaatcaagaaagaactaggaagaagaaagacagaaacataatagttaggaaattaatatcagattacaatattggtgggaacacagtcatagaatataacagtacatacttattccaaggcctctgactcactaaatttggggcattctctgttaataagaacaatggtaggaaatatttatcacctgcttaccatgggccaagtactatgcttgtttactttgtcatattatcttattagatttttgcagccattctgcaaatcaagtattatccctactctgcagatggaggaaactaggctcagagagtccagaagtttgtccaaggtcttatagcaagtccgtgatgaagccagcatgctagctaaccccaagctgtctgattccagaatcaagcccttaaaccctacactcttctcctttggtcatgaaaaatagttctgatatcagaagctgatgttctaaataggattgaagatttatgtttaaataaatttagtttaacttcacctttaatctgtactcctctatttacccaatattcaaagagcaagtaagacctgttagctactaataagagtgctgtaaactctaagaaatacattttgaaaagtgcgttaggtgctttgggaatgttttatcaaataattgcaaaggtcatagatagttgactcttcagactagtggcattttgttaggattacgtttgtataaaaatattatgaattatatagaggcatggcctaaagcaactaaaagcagcactttctaacatttattctctgtattcagactacatgaaatattccccagatatttattttgctatggctggaggacaggtttgcatatatcccactagccaatgtatgtcctgtttcaggtgtctgattgaattataatctgtacgaatcctatcagtcttgttgtagagataaactcttgtttagcactagctctttgtggaaatacaactacttcagataatggccaagtaattctcctttatcaactgctcagggtctgatccggaaatcaaaaaagggagccctttcaataaagattctgatctctcggaaacaaggcaagctctgacacacaacatctcattctgctgcctatcagtgatgagaggctctccattttgctgcatgccattcagacactgggagggagggagaaatactgtttagtaaattaactaatttctcaaaaattacaatgtgaactcacacatattttgctgtcttttttgataccaccataatacagggctagaatatctcgtaacaggaaataaatttgtaatcatcttctgaaatgtagggtggtcaagtaagatagcagatttttgccctgtagcggctcaataatctattcatcaagttttcacacggtacacttgcagagccaagacttaagaaattataccgtgtgcgttttaaggacaaagattctgacagcctgggaatctggagacccagagtcaaacctcgggagaaccaatgtgtctggcatttggattctactttataaaaatgataatattagactagttcttagttggcaaactggcagcctagaggctaaatgctgccatgataaatatgttgagtttggttcacataaggtggtggtggtttaattatgccaacattagaaaatttgagcagtttcacagaaaagtctggattcttgaaaagttttgaaaaataaaatgatctagaaatattgggcctgaaatttcaaatagtagcagtattttagagcagtgtaccagctgtttagagggcacatatcaaatttgcaccagaggccccaacatcccctgttgtcttccatacatactcaatttcatgtattcacattacttgcccagcccctgtgtaagatcgtctcagaataagatactgggatgaactaagaaacaaactcattcaactacccatgaaaggtcctttttagactctgcattgatgttggccacaactcctaaacctaattctgcagtattttggatttacattgttatagcgtcttggcttggtaaaaataatgcccacttcaattttgattgttttaacatttaaatgttaggtactgcagataatgccattaaaaatttaaccacccttgtgtgacgtggaggttgtaggaaaaaaaaaaaattaaccactcatagctgaatcctttgaacagttaaaatttatcttttgttaatgctgtgtatcagaaatgaggcttttaaaacttgttttgattagtgtttgttacttttataagtaaacagctcctttccttcatatacagagcctacgtcacttgtctggaggagttatttagtcttgttatttgtgagcagaaatttttaaaaggttgaatttggcaaatatagatatgcctaacatggtaagaggaatgattgtaaacagtctcccagtttcagagctgccacattgcaagacctatagagacacaaggtaagttacgtagatacaaacacagatctgaagctacacgtaacttaataccttgcaactggtgtgtgttgagctttaatagagctattttatgaattaatgggtgattctttgataagaatgtgcaattgatctcttcttttgtcccaaagaatttcatttgaactttgtttaaacttcttttcatctaagcaaaaggaagacttgatatgtacccaaagttattttgctaatggtccatacaacccttttgattcctttttttagataacttttgagccaaagtctatgttcctatttatattgtgtttctcaaaatcttcagcaatcaagatgattagtcctaaatgctctaaagctagcaatttattttcttttcctattttcaacctgtctgaaaactggctcaccattcctcaccccacattcttctatttgggtgtaacattccgagatgcagagttgcaaatttcttcaaccttaaagttagcttctatgattggatctttggacaaaattgacatgtagtgacttactcctaccaaaaaaaaaacatatatatatgcagaaaattttgcattcatactgtggaatttgagtccagacaccaaatacaagatgcagctaatgtccgtaacgtttctttaaatgctatcgtactgactctgggttgtctgtctcttgagacataggcgacttgagcatttgtagtgggcctgtcctttgggcagacttgttgttgctaaaaatactagttggctcggtatattcaaactgtctttgccatgttcaaggtagagagttgttcactatccagaagctttattacaaagtctaggacacttcccatccttggaactcatctttttgtctttggaagtcttaaaatttatagttcaagcattctctttcccagtcgaaaaatataattcagaagccaagagtttatatatagatagatagatagtacatgctagtttaaaaatgaatgtaaaaggccattaaagttgctttttaaggtttgaaatccccaagctttacttcaattgattgaaatgatacatgtattcaaatgtatacctaccaatttttgtattttgtatttctatacacacattttatattttgagacttaacctaccttttgcacataaagcagccttctgtaccaaagttactgagtttggactttgtttccaccatcataaatcatgcagatgagatctgtggttattttcagccacacatgatgaaaatactctgtgcctcattgatgtttctgggttaaatctttgcagaattgtgttcttggaagtttgttcttcctattatttatttttatttatatttatttatttatttattttgagacggagtttcgctcttgttgcccaggctggagtgcgatggcttgatctcggctcaccacaaccttcgcagcctgggttcaagcaattctcctgcctcagcctcccgagtagctgggattacaggcatgcaccaccacgcctgcctaattctgtatttttagtagagatggggtttctccatgttggtcaggctggtcttgaactcctgacctcaggtgatctgcccacctcggcctcccaaagtgctgggattacaggcgtaagccactgtgcccagcccctattattttcttagggtgccttttaaactgcttggtgcaaacccttctcactttaggaagaccttaatcttcccgcttgcacctcttcctgccccctgcctccaacccctccttttaccataaaagagaagggatctgttagtagtcatttattcttgtgggtgactgactagtgacatttgggaggaattagttcctgtcagggtattctgggtaagtatctgcaattgtgaaataacatcctaagagttcgtttctcattacaggaacttaaaaccaataaactagcaagggagtgaatactttagggaccccaggaatcatccaaacctttgactgcctttgagactaaatcttttaaaattcttttagaggttattagggcaggaaagggaagtttagaagccaccacatctggtgattccatgctaaaggccccctgtctcttgtgaagagataacctcaagcgctgactcagtattctgaaatgtcttctggaatcagctgaggctgaggaccctttacttaaatattgtcctggagaggggagaagcacaggaaggcatactaagtaacccctgaccaacctctatgagaaaacatcctacgagaaacatgacaactgacaaaaactgctgacaatcaaccatgcaaattgtgaagtgtcagaactctttggcttttaaaaattaacctttgttatttagatagtaataattacccatgtctaaataatccaagcaattcttttctctaataagttggttgctccacactgtgctttttttggacacctcctccaggctcaggcctagtcctcatcctgcccccaaccaccttcaacttgaccttccttctttcttctcaagtggtatgcatgtttatttaagtttctgacccagttatttatttaggcggtgttgagtgaaaatttcaaatgttagattcctttaaaattcctccaccccctatcacccctgccttccaaataaaaagatccattgccctggaatgcaccactgtgtcttcttgctgtgtggtacaaatgtaaaacaaaaacaaaaacaaaaacatgtgtctctggtgctttttcattaatagaggttttagaaaaatgtgcccagtgccttttacaaatatctttcagccctgtctcttcaccatccaagtgaagtggacactggggaggtattgatgctatcttccatgtcagaaactctttcttttcgcatttttataaatgcaaaatagaccaaagaatagaaacatcataaatacatcttgagatttttggctgctagcagcattatatccatagtcacaattaatgttcacatcaaacctgtaaggttgatgcttttattttgtattttatcatagtggtagtggtggggagagagacattgctaagcccagggtggttagggaacatacccaaggacacataactagtaattgagagagcaacgtgctttcaccctgctcaagttacttaatgagtgtagactatggataaagtgcagactgtaagctctatttccaaatacagaaaaaggaagttaggtgaagaagaattaacgaagcatttgtaaatcgcttcacccagtgcctggcacatggtaaattctcagtaaatgttagaaagtattattatcccagtataaactctttgagaactttctttcagggagaattttaatgacccattatttcttactagtgagatgtgaagttattgacttatcactgctgagcttggcatgttgagctctgtttctgtttattaatgtgatgaggttacttatggggagggaggatccctgctgtgtggtggcggtaattatcagcattgctgtgtggctgtaggaaccaattgctagcaagtgctgttttttttcttttttttttttaaatcccattatataatttaacaatcattttgttccatagtgagaggaaaagaatttagcagccttcagctggagctgaatgggaaagcaaattatagaaatcactgacagtagtgcctggctagagtaggattgtttcctactgaatatttgaaagtatgttgtccaatctaattttgaaagactcgagtcactgggcttccattgccttccttgggagctataattacatggcctaataaagctcagtggtgggacattttccccagctgatacaggagcaatggatgtattcacaggaggcctggtcaatgtacttttcaaaatgggatttagagaagggacacaaacatgttttgctcactcgggaaaatattcatttcctgctatcaaaagatgtttctttggtccatcctgctggcattgaaccctgatttgctatataatgggactttctttaactttgtattgtggagaatcctaaaaatacacaaaaataggcagaacagtataatgaacacctatgcacccaaaactagccccaacagcctttaatcagtggccagttccaccccatccacatgtccatctatgttgccccttctagttattttgaaacaaaacatgtcattttttaaaattttggtaacataaacataaaatttacctaaattttaactactttagaatgtataactcattatcattaaatatagtcacaatgttatgcaaccatcatgagtatctagtgccagaacatttccatcaccccgaaagaacactgtgtacccattaagtagtcattcctgttaccccctacacccagtccctggcatccactagtctgcttctgtctctatggattgcctattttggatatttcatgtaaatggaatcatacaatatatggccttttttgtctggcttctctttttttttttttgagacggagtctggctctgtcacccaggctggagcacagtggtgcaatctcggctcactgcaagctccgcctcctgggttcaagccattctcctgcctcagtctggcttctcttttacttagcataatgttttacgtgattcatccacatatcatgcatcagtatttcattcctttccatggctgaataatattttattgtatggatatcccacattttgtgtacctgttcttctgttgatagacattttgtttttttctgctttttgtctattgtgaatagtgctactttgaacactcatgtacaagtttttgtttgaacacctgttttcaattcttttgagtatacttctagaagtggaattgctgagtcatgtgtcaattctgtgtgtaacttattgaggaacccattaactgttcaccgcagtaactataccattttacattaccattagcaatgtatagaggttccagtttccccacatcctcaccaatacttgtgattttctgccttttttcttcttaaattaacatccatcctagtagatgtaaagtgatatctcattgtggttttggtttgtattttcctaatgactaatgacatcaagcctttctacatgtcattgttagccatttgtatatcttctttggaggaatgtctattcaagtcctttgcccatttttaaattgggttgcttgtctttctgttattgagttgtaagagttctttatatattctggatagtagacctttatcagatatatgatttgcaaatacttttcccattctgtgggctgtcttttcacagtcttgatagtgtcctttcattcacaaatgcttataattttgataaaattaattttttcttttttttttattttggtgcttgtgcatttgttgtcatatctaagaagccattgctaaatctaaggtcaaggagagttacccctatggtttctcctgaaagtttgatagtgttagctcttatatttaggtctttgatccattttgagttaatatttttgtatagggtgtgaggtaaaggtttaacatcatttttttgcatgtgaatatccagttgtctcagcactatttgtagaagaaactgtcatataattttatccataagtatttcagcatttttctctaaaagataagaacttctttttacaaaactacagtaccattattacacttttaaaatactggccaggtgtggtggctcaacgcctgtaatcccaacactttgggaggccgaggcgggcggatcacaaagtcaggagatcgagaccatcccggctaacatggtgaaaccccgtgtctactaaaaatacaaaaaaattagccgggcgtgatggcgggtgcctgtagtcccagctactcgagaggctgaggcaggagaatggtgtgaacccaagaggtggagcttgcagtgagccgagatcgcgccagcctgggtgacacagtgagactctgtctcaaacaaaaaaaaaattaaccagatttcttgagtatcatcaaatatctaagtccgtattcagaattgtaattatctcaaaatgtgtatatctttttttaaaaaaattaatatctaaataaggtgcacccattgcaatttgttggtgtatctaagtgtttttaaatctataagttttctttgcgtctctttttttctcccttgcaatttatgtgttgaaaaaactctttgtcttgactagtatcctggtctagattttgttgattgtatcctcatgatgttacatgttcctcagtcctctgaatttcctgtaaatcagtggctggagctagaggcctgatcaggttcagatttctgtttttatttttggcagtactacttcctaggtaatatgcgttcttataccaaaaggcaaattctatttacttttttatttatttatttttttctatttactttttaaaatgttaacagtcattgatgatcactgcctgagtctgctagcttattaggaggcacaaaatggtggcattcttctactatgtcttcttcatttattagatggaatacctacttttttatgaacagaaactttccctcttttattattcaactacccagtggtaagatttgtattaaaaaggcagtatagactcttcagtctttccttttatttgtcagctcttagttagtttgttatttttttctaacagtgccagtcatattctttgggtggtgggggatgaccttgttaaggcatttaattaagcacatttaaagtgtttctacacattacagctattattcttatctatgctcagattatcccatctttcaccactgggagtctcttgaaattgaatcctttttgacatgattttgtggtctttgatagtttctgggctattacatattgtaatttcccaacttttatctggttggaatgtagtctacttgtggcacttcccaaatttccctataagcacttataggtcttgaaacttccttggcttcttggagaaggtgggaaggtttccctagccgttgtggaatcataagaagacaagtcagaacaggctttggaaactcactcatgaaatgagtttcatgagattttatttagtttctattaggtatacaaagaaaaagaaaatataatttctgcctgaagattttggagcctgatgaggtatcttttaggacctggaaacatagtgctgatatcaggaatgtagatttggacaaagccaaagccatcaatgtggttttattgtggctccattttagttctgtctctactactaagtcaggaattgattgctagttattctgaattcttttcatataattataaaaaatatataagtacctaataaggtgatctttgttgaagatatttttgaaggtaaaagtctggaaatggatgtgtttttctaagcctagaaaatgcatgtaaaagcacatagatggcttttttctcaaatggtctctacatccccattgagtaagggtgatgtttattttctgcctattttataagttgctaagtagtgtaatgagtttatatttatagagtgcttggagcttttgcatgaaaggtgctaaattagagtttattgtttattgaatttatttgatgtgtccaacctcctgggaacattcgctgaagttaattaaaaacagatagttcccacactgacagcttacagtgccacttacaaaccagtaacataaacagtgtgcacttttgtaaccctaagttgggacacctagagaaccacagttctttctgataggggaataatcctacttttatgtgaaaatttgactgctgagttaaaacagagatattctcaattttgtctgagtcacctacctactcccattaaaaaaaaatacttagaatatggagagtttcctcaattttcaaatataacttacaggttgaaaaatttaaaaataatgtttcctttatatcattttgggagtacatgaaggtaaaagcttgtgttttatatattgttttatgataactttttctttgcaggaatggcattccaaagcagccaattgcttgtgctttcttaccccaacttaatggaagcagtgaagcatcattaaaataatggcttgtttgcttcctttgccagttggtgatggagttttgtggtgctggctctgtcaccgacctgatcaagaacacaaaaggtaacacgttgaaagaggagtggattgcatacatctgcagggaaatcttacgggtaggttacgagtggggactggcccacctcccaaagtcttcaagcaacacatgatatcttatgagggattgaatttttttctgactttctagtgaaattcataagcatatcaaaaaccctttaaaagtttatcctatcagtggtggtggtggtggtagtggtagtttggtgtgaaggtctgctctgatggaagtgagcgccattctggagataggccatgagcatattttcatttaggttgacattgggtgatttctcttaacaagggattcattttcaatgctgtttccaattagaaacctgattttagatcataaagacagtgttccacttaggaaatgaattattttatgagatattttaatcactcatttaagttatctgtttgtgaaagttcacaattaatatattatccctaatggtgtaataccttcccaccatataaagtttataaggattgtgtgactttagtcattcctatacatacaacctagtttaaccgattttacctttaaaaaaaatctttgtgacctaatcacttaaactaatcaaaatagctgaacaagactgcctgtttgcccagttttcccacacatcccccaatcaggaaatctagacaatagtatcatatttgctgagctgagttcaggaagaagaaagtaactgggcatattttagttcattcagactagcttaatcatcccttcctactaatatggaggttattatatgtctactgagcattcttattaaatcttcctggccattgttatttatttataagctctgccttcttaatttaaggcaacaaaagttaaaacttttttactgtgtgttcaagatatgcctttgagagatagattgtatgctttgggtggatggatgaaatggatagaagttaaaaaagaaggaaggcataagaagacgatgtctgttcattaaatgcaaaccaaattaggcaaaaggcaaatagaaaatggaattttaaaattataacattgatgtgaatgacttctatcctgaaaactacaaaatatcactgagaaatattaaagaagaccttaataaatggaggtgtacattatttcacagattacccaatattctaaagacatcatttctacccagtttgatccatggtttcattgaacttccaattaaaattcctataggtatatttgtggaaatttataaagctgattttcaaacattatatagaaatgcaaagggccaagaataaccaaggcaatcttgaagaagaagagcaaagctggagaatttatgctaccagttatcaggatttattataaagctactaataaattaagacagagtagtattgttacaagattagacaatggccaaaggaacagaatcaagggtccaggaacagacccacatcatatggatgatacctggtctgtgtcaaaggaaagggttcttttatcagtaaatagtacttgatcaattgaatatccataagaaaacatgaaacctgacacctgctacataccatattcaaaaatttattccagctgggttatagatataaatgggaaaaatataaaaattaaagcacttaagaaaaaacacatacatccatggcttgggataggcaaaaatataaattatatgttttgtgttcttaaacagaacataacacaaaatttgaggggaaacaaggaggcctggctgctgatttccttcacatctgacgtttatctctgttttgatgtgccattgtgcaaacttactttgaatttctgacttaaaattttgctcattcagatagagcataatggattatttagtcatcctgaccactcagtggctgccaagaacctgtcaggtctctagggctggttctgcccaatatgcctttctgcactgctggggaaccctacagaggatcagtcatttgatctaatcttcatggttctaaaagcagcagggatgtttcatcacatgagcatctctcaatacctttcacacattctcaatgtgtggaaacaatggctttcctcctttttccagtatattctccgaaatgataccagcatttcagacatgactcactggaagagacatttgatcacccaaaggtctctggccacaagaggttttggaggtgacctccatgcattgtatgatctcattaaaagaacttttggctcacttccatgctctggtatctgctttcaaccacttcagtagtgaaagagggaaagggatcttcagtccctctcttaaggatttatggggtacataaattttgtgaaaaccacacatttaaacccctgatgcctaccctgtgacaaactgaacagataagaaaggcaattttttaagacctaaaccagtgcctcaaacccttctataacatggtttatgttttctgatatctctaaatgtatatgtgggtctttttggacctctgtactctcatgctgaatttctttgacaagagaattcagatatctaggtttgtttcttttcctgtcaacctcatttttcataccatgattttgttgttgtggagaagatgaaaagcacaaaaaattaaaggtaataaagaacactcggggacccgatacattgaattatcaggtgttagcataaaataatttgctttaagactccatttttagattattttagattataatttatctgaaaaatatatgactactttagagtaagtctgtaggttaaagaattcacaccacaaagaagccaaaaacagagtaattcatgaagaaatggaacacaaacaggtttagttgtcactgaataattctcacataatgagcacaaagtcacaaatagcataaactagcataaactaaaaatgacagtgatgaatgccaacaaaagaaatagaaactgtattcctttttaaatgtaaggcacaatgggtaaagccaatgggaaatttcttggctggtctgagaaatattttacttcgcttaattaaaattgtataacaaggccgggtgctgtggctcacacctggattcccagcactttgggaggccgaagtgaatggatcacctgaggtcaggagttcaagaccagcctggccaacatggtgaaaccctgtctgtactaaaataaattagcctggcgtggtggcaggcacctgtaatcccagctactctggaggctgaggcagtcgcttgaatccaagacacagaggttgcagtgagcccagaccacgccattgcactccagcctgggcgacagagtaaggctctgtctcagtcaatcaatcattcaatgaaattggataacagaatgtaaattttaacttttaaattcaaatatcctgcagggattcagttaaatcaggttagttttctgtacagagactgtgtagatggttctattttaaactgtttaaacttcgcttttcacagtagtattaactgaaactcatgttcatgttggaaccgtataattacttgtgtggttccctgatacctgataatcagatccaatatgcaagcatttcattaaacacagcaccatgcattgcaaggactgcctgggtactttaatttatattgatgaattgcctacagttagaagagcactatgagcacatgaaagatgtgattataattctgaaaagtatgtctgggtgagtgtaaagtttttggatccttaacagtcaaaataatttattggcatcttggcttatgttcctattaacccttcttaactctccatcactccaggggctgagtcacctgcaccagcataaagtgattcatcgagatattaaagggcaaaatgtcttgctgactgaaaatgcagaagttaaactaggtaagagcagaatcctgtgagccttggaattgcaggaagtgatgagattatattaacagctctaaaaaaattaatgttaatttgtcaccgtggatttggagagcattgccctaaaaatggaaaggaaaatgtttctttgcctattttaaaaaatattttctcaaggcattctgaggaatgaattatatataatgtgggaacagaaccacttgcttaatcaatatatagaaataattgagatttttttgtttcagcagagattagaagtgacaaactttgaaatggcctcctatatcttacagtttgtttatactgttgctgctataacagagcactaggacccaatttttttccattaaaatatacacaggcatattcagaataatcaattcctgctatattcccataggtttaagttatatttacattgattttgttattaccttgggctcccgtgcaaagtggatacttaatattctactttaggtgcatactgattacccccacttccatcagtgggagaatccttctctttggcgtatctgttagagctctttccgcaacaaatctgggactgcccaaatagagaattaccacatgcatttgactgcttgatgtatatgagtaagagcatgaattgacaaatatccagtaggatatgtaacttgtcatctagaaaagaatcgctgtccatatgattgtatattttcaaagagatttaaacatcttctatgtttatatcccaaacatttgctcttcctttttgttgaaatatatgacttccattttttttcttagttaacatttgggaccaaactttctcacctcatgaatattctcttttaaaaacaaaagtatacattatgtaggctaagcagttatatatgtatcaactagataagctatcctgagagcattcttacttcactaattaacagttacttgttgagtatatattatatgccaggccctgtacaagacaattttctatagattatctctcataaacatcagagcaactctgtgtagatgtcatcatcctcattttacagattaggaaaccgaagctcagagaggttgatctactagccctaggtcataccactagtagcggcagaaatgagatacaaacttaggcagtctgactcagacttttgcttttaatcacttgtcttgtatccccaaaatactaccctttctgacaaccaagcttacttttttttaacacctatttttggtccctgtgaagccttggtgtaatcaaatgtaattctttgtgccttcctcatgggtacacttcatccatttctcatgcagtttaaaaacatattcacaatatagaaaaggtagaagcaacccaggtgcccatcaacaggtgaacagataaacaaaatgtggtccatacacacaatggaatattattcaaccttgagaaggaaggaaattctaacacatgctgcaacgtggatgaaccttgatgatattatgctaactgaaataagccagtcacaaaaagacaaatactgtatgattccacttatacaaggtagtgagaatagtcaaatttatagagatggaaagtagaataattgccaggggttggggcaagggggaattgggagctattgtttaataggtacaaagtttcagctggggaagatgagaaattctggagatggacagtggtgaaggttgcacaacagtgtggatgtgcttagtgccccagaaatgtacatttgaaaatggtcaaaattgtacactttatgttacttatgttttaccacaataaaataattcacattcattttatcgctatctaaaacctatgatcacagactttatttacttgtcttttcttaaatagtggactttggagtcagtgctcagcttgatcgaacagtgggcaggaggaatactttcattggaactccctactggatggcaccagaagttattgcctgtgatgaaaacccagatgccacatatgatttcaaggtatggcttctttgtcgtgtttcaaaactatgcctaccatcttatcctgagtcttataaagtcttacatgcccttatatttatgatttatgtcacccaaagggagaactgaaaaacattatttgagtttaagacctgtaagacattcaagtgaggatctttttaatgaattcacccatcttatctgatggcctgtttgtaaaaaataaaaaaataaataaaaagtttaaatcattttctatatttttttaaatttactcttgcttcttattattggaaaatagattggatttccattttggttatggtttagatttttggaagagtatatattctgatagctttttacgttaaactaagatgtgagtttgttgtcttgggtcatctttttctgattgagaataatctgacttacttctacaatgctcgaagtataattatctggggtttctttttcatgagagggaatcagatggaatattggtgactactttatggtatttctgtcgtgtggcctgatgtttcatagaaatttgatttgtgacttgttactttatattataaactagaaatttgctaatacattcaaagctgtgttcaaatagatttctccaagaagcccttctcttttctattctgctagccaataaccaaacataattttgcattattgcccctcaggtttattgtctggactttcaggtgacacggctttctaatgaatggtgactgaaagtcaaggcaataaaattaggggcaatgggatctaggaactgtgtgtgggtttccaggctgtgcattaggtagagagacaccctgtggtctttgtgtacattacaggacaacttgggcaaaacttgatctgcttgggctggtttcagaggtgcatggacttttcaccaaaacactttaatgatcctctgtaaatactcttatctaacagatgaagaaactgaggccgaggtctgcaggtgctcaccgggttagcaatcctctcagagttagcacttgaatgcaggtctccaaactttctgttcagagccctttccaatatattaccttgctcctctgtaatgtacttccatataaatctccaatttatcaattgaacagtatatttgaagaatatttcacttttaaggaatatttttagttctcgacatgtggggttattattgaaatcaggtctcaaagatgcaaacattgcagcgtttttgaggccccgtatctcagtgttgacagaaaatttgcctcttttgggaattgcaagcttgaaggtctgaaaacctaataatctcccataaatttcctccttccttcaaagttagtcactgtaataacctgacaacaatctgtctgaaaacagctgccaagttaaaaattaatctcctgccaaaatgtcatttttttaaactgctaatgataagcatatttaaataattctgtttgcaaatcccttcagagaagccactacaaaatatacatcccaggccagatatgggtatcatgattagctacaagcaattcttcaaaccatagttatacctaacaagtgctaactagtctacatctgggccacagatattctagattactatgtaacatagcatggggaaacagcgtttgcagctcttacaacctcagcttaatcttttaagtattgtgactgactgcactatatatgggacttttgttatgtaaataaagtgggtgcctacaactgacttgttttcagtagggtatctagaagaggctttccttctggccaagccaaagcttggaattaaactgatattttggtcctctttcctcagattatggctaaggagtatagtttaagatcactgtaaatggtgtgagaccagtgcataactctaggtatgggcaaatcctgttgtatgagtagccacagaggtcgtcatgctgcacagtgatttcagaggtactggaaggctcacctggctataaaagtatcctgagacattaaaaagattgaagatgaatgtctgtgtgtttttttaaaaaataaagaatcctgatagaataggttcaatggtgtcagtcatttagaccttagtgcaaattagtttaacaggattgtcaggaatgtaggttgtgcaagaggaggaaaaagtcatggcagggatatgagcttcactggttatatgccatgggtaaaaagaggaggatgacaaaagaatgaataaggaagacttttctacagaggactttataatattgaattattttaggtttttaaaaaaattcatagtggtcttcaaagacatcttagacaaatcaaatagtaaataataaataacaaaaccaagccataccctgttggggtatagtggaaggtttggggattctttgcagatttatttaatccacttatacagttttactgtgggccagagaagatgctgatctttaaataaccttactacttctttcttggcaccatatatcatccccttttctgttcagtatccttaggaatgtaacctgtcaccaggggacaacttgacaatatgctgactttcaaaatcatttattcattcactcagtgcatatttatagactatccattgtgtataaggagttagtcaagctgtatctgtacatgcagtttctgatagaaggttcatttgagaccccatcaaagcccgaggatttcactgtgtgtttggtggtccacttggcccagtggtgtatcccagccccagaagcttgatgtcaacactttgggccctcatgtgctatagccactttcagccgagagtgtgtatttagaataaaggatgacttggccaccggactttattagatttcttaccacaaaagtcctttctgtaaaataaagacaagaagaaaaagaaaaagagtatagcttagttttgttatttgatttattgtttatcaattattttttgatgtgtctaagatgtctttaaagaccactataactttttacaaaacctaaagtaactcaacgtataaggtcttctgtagctttttattgcagagtctggttttgtgtgatatctactgggcacagtaagtaactcactgaaaatagaccctctcctaaggaggagtgccagaatctcatttgccgggtgtgctggctttcccctggaggcccttcctttcttgttttcagaaattctgtcaaaacacttcaagtgaaaggaaaggtttcatttccctgataagtatgtggggcaataatgaaagctttcccgtttaataataagcattcaaaagatttgaaattaataaaactgttcaaaatgcctaggctgtttaaattgttatttttttaacctactttgaatttcattttggttggatgggatctgctaagcattttatagtcctgtgtatttattactttaacagaaccacccactaagaaatttctgtggctgaatgccacagtatagtacacataatgtagtcttattcacccctcccaccccatagacacacacacacacacacacacacacacacacacacacgggaaatctataaagaacctggaaaaacttaatagtatttacttttgaatagggcatgtggatggaaaacttacaatttttattttctatatctttctgtcctgttatgttttttgccataaacaggccttgctcttatatgaagccaatgaagtaagagatgcacagtgaaatggcttacccccttatcccactccccaccagattcctgtcctcaggcctgatctgtgccaatgttgtttattatttgcctaaactctgtttatgagactttcatatgggtgctgcagattatttgcagacatgggtgtctcctccagcgtttgggtgaatattgtgctctggttgtagagaaaaagtactcttttcccctgtgtcacagataattggcattattcaggcagggtggaaatacttcttctaagtaagagtttcagttggaaatgaagtgagcaacctaactagtggtagagtttccgccgtgcagggtgtcacctgagaggacaatattcagattgcagaatgatgcatttacactctcaaacaagtcgtggcctctgtctactgagattcaaacaaaggtccttccctattcgatcagaaggaagatgacccagatagcatgttagtgtcaccaacaggaaactgaaactcctattcaacatatttctgtggctctctgttcacacccacctataaaggattccttagtgaaacgcagccagtacctcctccacgcaacatgctgatacccaggggaagagagtgagctattctaatattttccctttggtcacataacaagtgaaaatggacaaaaaactaaagatttctgtcctcagtttgttttatgtgtgaaatgggattattaataactatctccacttcagtgaccctaactcaccacctaagttctgtatctagataacataatatataaatatataacataattaataagagtcagtcctttgaagtcagacaggaccagtttagactttgcctcctatttgcaaattaactcaggggagttatttaactttttgtaaacctgcataaaatgggaataataaattgtttattcggaggttataatagaataaagtgagaatatatataaagggattaatacagtgtccaccacttggtaagtactcaatatatagtacttagtatatatattatagatagttttgtgtttatgttatcatatggaagtattgctatttggggccttttttttttttttttttttttaagacggagtctacctcttgtcacctagactggaatgcagtggcacgatctcggctcactgcaacctctgcctcctgggttcaagcgattctcctgcctcagcctcctgagtagctgggattacaggcgcccgccaccacgcccagtgaatttttgtgtttttagtagagacagggtttcactgtgttggccaggctggtcttgatctcctgacctcgtgatctgcccaccttggcctcccaaagtgctgggattacaagcgtgagccactggacccggtgggggccattttttacccctaaaaggcaacagtttcatacggttcaacctcatatttgtgttacacacctctgtctgcttacgttgagccagaatctgcttctctataacttttaccactcaattaagatgttgtccctagggaccatacacacaatgcatcaatttctttttcccacctggaacatttcaaaagaataaactagtcacaaataagttacccaacaaaagacgattttctgctctgtgatacagtatgctggctgtgcccattattaagctattgtctgtcaactgtggactgccgtgctgctctctgctttgtgataatggagctaggagtcagctgtcctcccttctgtttgtccatctgacttcttatcaggctctgccagcagggagcaatagagaacgggagatcaagtctggaggaggaaggaggacacacgttttcctgtttgcttcctgtaagcttcttgtttatgcctgcatggtccctgtgacctctttgaccaccactgagtaccagagctccctgtcatcttacctgactctggtttgctggttgaactgccagttgatgatatctggtcctaagggtctatctgtacccacattcgttgaatacccaatgcagcatgtactgcattgtatattaggcactttttgcatattcttccttattgaattctcttaccagtcctgcaagacatgtgttcttttcctgttgcagttcttttcatgggctcagagttgttagttgtgtcacagttgggtctggctgcagaccataggcaccttctacctcatggtgcacattggggttcttgtcttgtgccacacagcctctcattcttctgtggctggttcagacatctaaacgtgttgcttttcttcactgtgttgagcagcccagccccagaaggaatgctttcttgttctgttcaagttgcttgtgtatcagctgttccccactcccaccctttccagcagccaaaagttctgtcttgcctctgccttcccaaaggcactagaatttgtctctcttctgtttgtaatgcacatagcgctagggtattaatcatgccacaggctaggctgcacaacacctctggaataatgaattatccagcttctgccaaaatgagtcacaccatggccatgaacgaaacttatctctttctgactctttcctcatcttgttcttccatcttcccttgcttgtctcctgtgatctgtcttgccagtggtaattggagcattttctcctttacttaagttctgaagtgtctttgggactcgctaatgtatccaacggctaaacaaggcctgtcaaggacatttatggctttctagcatgggcagttgagtgtagcttacaagcaactttggatatatatgaccaggaatataaatgttccttttggaaaacaagagaaccccagccaaaaaaaaaaaaaaaaaaaaaaaaaaaatcctaacaatgatatcaaatgaaggcttaaggaagcagcagaattgactaggtcatgtgacttagcagagtatgcacaggtatttgtggtgatatgacctttggtttgaaaggggtgttctggtggcttagggaaaggctgcccaagagggattctgaggtgatgtgtactaaataaagtacatattttttccctaaaccttcttgcttcctgtggaataaatccaggattacctaacaaatgagacctctccatttccttactgtcaaagtatgttcttcaaattactgctgtatgtgtattatcacttaggaatgcttttgtctgtacttacgtttcttatgtcaccagaaatctagaggtaggcagttcagggttcatgtgatgcttcactgataccttcagaaaccgaagctcctagctttctgtgctggcatcattagtctgttggcaataactcatggttgcaagatggatgctgtagctccagatatcatatttttattcaaggcactaagaagtgggaaaaagttagcaagacactagctatatttgtcccttatttcaggaaaagcagaagctcccagaagatgtttgcttatgtctcattggagaaaactatgtcacatccctaactgccatccttagctgtcggggagtcaggataggcaagtgtggctttgctatactctgaaatggaagcagcaacaaaaatgagggttgaaaatgaccattgggttagccaataaacaatttctgccacaactaaatgaagggaaatcatagaagactaagttgggcaggcaaaggcagtgtcacctgacagtggagaagaaggaaatcaatattcttgagccctactctgtgccagattttgtgctagcagcatacctgatcaatacatgcatgccacggttatttccattgtgcaattgagaaagctaagctctgagcaacagtctgcatgtagctaaattggaaacctctatttgaattcggatctgcctgtcttaaaagcctattctcagctgggtgtagtggctcatgcccataatcccaacactttgagaacccgaggtgggaggattgcttgagcccaggagttcaagaccagcctgagccacatagtgaaacctcatctcaatcaatcaatcaatacctgtttctttctttctaccaatccatgttgccattgggaaattgaggcgagttttatagcatgaaactggagtacctcactgaatctcagtacctttattgagttgccagcaccttcagtcacctatggacaaagtaggaatctgaagtaattattttatggattaaaaatgcattttgataacaaaaatgataaggggaaaaatggtgaatactcaagtccttagattgtgatgctagttaaaagagaactggcctaggaagcagaagacccagctcagtttaaaaccagctgctaagttgctctttgatcttgggtaagtcatgttccctcatttgtgaagtgaaaggtttggctaggtgatctgcaaagagtctactagccctagaacacttaggttttgctacgttctctcatgtatctttcatttgttcattcattcaataaatatttattaagggcctactgtgtgccaggagcagttctaggtactttggatacatcagacaacagaacaaagatccttgccctgtggctcttaggttcttatgtatgtgtgttagaggtaaagggcacaagcaatcaacacaaaacatggtaaattagtgatgaataaacatgtcgtatgttagaggtggttagttctgtgggggacaaatatggggaaggggcatgagcagtgctggggggaggtcccaggggtcctcgttgagaacacaggggttgagcaggctttggggaggtgagggagtcagctagcacatcactgctgaggtgctgcaggaagaggtaacagcttgagtcaagatccaaaggctgggccttcgagcattttccttcttcctgacctgaggcctggccttgagttcttcttaccccagaaccatcattttctttcacatgtattggttttcaacccagctcaaagctttctggacttgaaagccatttaaattggacccttctgttgcagttagggccatagagcctggctgccaccttcttacttgtgtcttatttcacgctatagaaactctcagttcctagggatttgggtaaaatggtggtagaactaccaaggtctggagatactagagtcttatcaaaatagcacagggaccttaagagccaacccaccatttccagactattattgctgtgtttcctgtttaaagcctcctgaacagcaaatgattcagtgtttctctcatgttccgaaatgattatctttgtctatcaaccataaaaccccaggtacaggccgggcacggtggctcatgcctgtaatcccagcactttgggaggctgaggcaggtggatcacgaggtcaggagatcaagaccatcctgactaacactgtgaaacccgtctctactaaaaacacaaaaaattagccgggcatggtggcaggcacctgtagtcccagctactcgggaggctgaggcaggagaatggcgtgaacccaggaggcggagcttgcagtgagccaagattgcaccactgcactccagcctgggcgacagagcgagactccgtctcaaagaaaaaaaaaaaacaaaaaacccaggtacaatagaactgcgtttttgtctttaccagttattgctcctgagccaacttgtaatagatgggttgagccatccccatcagctccggaaataacctcactaagcgaggccaagagcctctgggagactcagtcacttgctaggccagagaaacacggggtgcagattgcgtttaatgaaaatctttgtgtacatcttgaaacataacaaagagaagggacaagagttgactttgtgagttgtgttgtatgcagagagttccttggagtcttagaatgatggtgttgtgaaggtgcattgctattcccagttgaactgagaactggtaacattgaaagaatcccccttgctcctagtgtgaggttacacatgtgccccagccacctgctctcaggtagactgcactttaggcaagaggctagaccccctagaaaaccccctccacattgtgcagacctctgcccaattactgaagagccctgagtgtcatttcacaggatattgagaaacttagttctggggagtgactcagcatgaaggttatgaattttatgaagctctcttccagttacatctctttttcatgtggccttgacatttgtttgatggcaatagcaaggaaacttacctttgatcactctaatctgagacaattttgaaaaatgtacaaaatgcatgaggtatttaaaatgaaatatctatattaggatgtgggccattgaaccaaatttgatactagattttcttaccaatctgctgtgaaactgaggcagcaagcctcttcttggtgttttctaaccaggttttccccatctcttgatattccccctctcatgcaatatttagagactactgagccacagacagagtatgggaggagaatattgttagagatggagattgtacaggtagaaatggaggcattagcctagaaaattctgttcagagaataaaagtcactctgagcataagaaataatataaaggtatactggcctctattgttacatactagtctactcacaaaataggcaataattgtttatcttttcaacaaatactttgagtacctcctactgtgcccaactctgatctaagcacaagagagacatcagtgaatgccatcatcaaaaagtctccctgtcctcatcttattaggtaaaaccatatgaaattgctgtttttctagttaaaccaattgaatataaataacacctactatctgatccagccattccactctcaggtatttaactaaaagaaataaaagcatacaccctcggatttgtacaccaatgtttgcagcacctgtatctgtaatagcccaaactagaaacagtccaaatgcaaaaacagtgatatgtccatagaatggaatactacacaacaataaaaaggagtgagatactgatatgtactacaacatgggtggacttcagaaacactattctacgtgaaacagatcgaatacataagaccacatatgatgtgatttcacttatacaaaactttggaagttacaaactaattcatagtgacagaaagcagatcattggttgcctagggacaggagagtggggatgggttcaggcaggaaaggaaggaggcaaatgagatctttgggggatgatgggtatgtttactgttttgactgtgatgatgtgttcacaggaggatccctacgtcataccttatcaaatggtgtactttaggtacagtttattatatgacaattatagctcaatgatggtgttataaacagtcaaatagcagcaatttcctatggttcaacccacagataagtttcagtaacgaattaatttaaaattgtttatattcatttttcatacatttattgataagctgccatgtgccagacaccatgagtggtactgtcaatgaaaagtaagactgtttctgctttgaaggttagtggaagaaataggtttgtaaacagaaaactgaatgactttcacaggaagttctgaagcaattaccaggtttaaccaagttgtcctttgttgactgaatttatgtgtgtgtctgccccttctttttcagagtgacttgtggtctttgggtatcaccgccattgaaatggcagaaggtgctccccgtaagtaccctcctctggggtgaaatctgttgctggtctgctctgcaggtactgaagtttccttgccaggagctgcagttgctttacttccactacaccgagccctgcatggattcaagctggcatatttagaaagcagagtcatcttaaatcaaccaggaatccattcatttcagagcagtgggagaatcctgtttttattagaaaaaaaaaaaaggaagaaaaagaaagcatactttggggagtcttgtttgttttacagattctgtacatcatttattcttggactactcctcacctgacataaaactgtgaccaactcacaagactataaactccaatgtatgaaaatccaaaattaattttcagtgcacaggttatacaaagactccactcaatggctatcactcctcttaaaatactgatgtttaaaattttagatttccctgctatttgagacagagtggctagggctccagcagtcttgagaatctcagttccttgagatttggagtattggccccagcagagagtctctgtcatgagactgtgcctcacagacttccatataggaagtgtaactgattgtcagccccagctgctgcaatggcagcaggccgcacctttcaagggccactccccgccagtgacctagcacagtggggatactaaggcaggccctttcctggaggacacaagattcctttgtaggcaactttcacccaagtaatcccctatgactttacaagacctgcaggacaggctgggacccttccacctaccttttctccctctctccttcactcagggtcagacttgcatagcaatctgatgacttcccatactgcctggctccttccctgtttccattcacatagtaatttacccagtaatatccttggtgtctgcatctcaaaggactaggacaaaaataggccctttatttgcacgacaggtcattatacttatgacttttaccttcgggttgtcatcgttttcttacttcccagtctagaattggtagaactcatctgtagcatgattgatttggagtgctggttgacaaaattgccctcattcacaatgctaataggcatgtgtgaatcagaaaaataatatattgcagtcttaaaccatattatcattcttgatgagtggtagacagggctaaaaataaacttctgcccacagaatcctttggcttttagggagcatatattcttattctagctacaaagtagaaattctcccagatgtttgaaaagtaaactaataaaatattttattaaaataagaacatatgagtgctttcactataaacgataatgtcatgtttacaagatgagatctttttataactttgtttttctgccagactctgtgtgacttaatcctctgggcttcctggggccagtgaatttaaaaacaaaatgaaacaaaacccgttacgaaacctgaaaagccattcgggatatctggaaacagagaaaatggggctctggggctggtgttttggactccaaaaatctgtgtagataacaattgcatttggatgagctgtcgacgtgtaagaaatagacgggataatgaaatgccttttatttatggcttaggcttttactaattaaaaatagcttaccatctccattgtagttgtcatctgatggtatttactttaaatgtcaggtggtcattcacagcaaggatggctggttgttgaccctttaacttagtttccttaaatatgaagtaaacatgtattcactagaaatgttagcagtagctatgtgaaccatgttgtattttatgagactcctgtaagtggatattggatctttcaaatgctcagaagcatttggatattctgactttgtgctcactggtggtgtgtaaactgagtgggtcattgggcagccattatctgcacagccaagacgggcttggcctgggtttggcctcctaactgtagctggcccttgttttggtctcttgcagctctctgtgacatgcaccccatgagagctctcttcctcatcccccggaacccagcgcctcggctgaagtctaagaagtggtgagtttggtcttcgatgtttcgcagatctaagggtgaggttttcttgtgattctattttggattagctctaatccctaggtcctgctgatagaatgagactaacatgtatgatgacttggtgaattactttccatatgctgtcattcatcttaaagtatatattgagtatctactgtttgtacagcaggtctttattcccccacctttaaggtaagaaattattagccaaaatgggtaagtgaagccaagtaataacatgaaagctctttgatctataactccaagtcatatctttcctggcagcacagaacagcttatcagagagggtgatagtttagagagtcagcctgttagattggctgatttctcttctattccttacaacaatcattccctaagtgcatatacataccaggtaatgtttgagattatttctctggctcgtgtatgagcatttgcagtttttttgtttttactactgttttcacatatggcaggtgatactggcttcttatttggggcagcgatttaacttttccttttgataaacttacataaaacagtggcttaatttaaaggaaactactacatgaatactagtatgagtggtgtgagggtacggcaaaaattatgttgataggatatgactgactgacatttgggaaacagttctacaggttaagccagatgttggatgtttgactttttggggataattatatagttgggatcttcctatcttattattccataaccaaaattcattgcttcctcctttcttcctatggaaatggtgtatcctccctgatacattcttgaatctcggattactcatggtctgaggtcaattcctgcactatttgtgacctcctatcctttttctagagataagtcctgggcagtgagaccatgagggacaggatccttctgcccctttccatagcccttcatgatcaggcgcttgactggggtcctcatgtttcccacccacccacacacaggctcacctctaccatacagggggcagccttaattaccaccagtcatctactaatgagagccaccctggtggaacagaggaaagggcacactgcacagaaagagggaaggaaacagccagaaaagagatggcagcctcagaattgccgggccctgcgaggggagtgagagttgctattggtaacaaggaggcagagcgttccctgctcctccttcctctgcagagggtcattgtggtgcaagacaacccttctctccccagcaacagccctcccattgggtgtcatacatcatgtgatcggcaaagcaccccaacaccctgcttcctctcttctccctggatcagactcccggggagagggactggcgcagttctcttccctggaagtgacagtgacactacaaagccctctgctaggttcctgcttgatatctgagctgagtctggtgtatacagtgggctttacttaccctgttccctgccctatcttctccttgtctccctttactgctgcaggacacgtattctgagcttttccacagaggaggacaaactggccctccacaaatgtatttggctgtcacactatggtcatataccctgttttaaaaatatgtgtattaattggcaacacttaaaaatctgtcaattgagcattacatttagatttctggcctttttcttgcaaagatgcagtgaactgcctgcaaagatgctagctgctgctcccatttaggacaagtgattgtccttctcctccagctgccacctccccccaactcagaagctggtgtcagttggttagtatacatctcctgttttcttttcttttcttttctttttttttttttttgagacggagtctcgctctgtcgcccaggctggagtgcagtggcacgatctcggctcactgcaagctctgcctcccgggttcacgccattctcctgcctcagtctcctgagtagctaggactacaggcgcccgccaccatgccctgctaattttttgtatttttttttttttttttagtagagacagggtttcaccgtgttggccaggatggtcttgatctcctgacctcatgatccgcccgcctcggcctcccaaagtgctgggattacaggcgtgagccaccgcgcctggccacatctcctgttttcatcttaaccatggtctacaccacccctttttgtgacctacctgaccccacagaaaagtgagtgaacagcccttgccctacagtgtcagttttcaccgactgagacccaaaaaagatcaacggtgtgctgaccttgtttgagaaatacaaacttttaggacaatgcagtctgatttttcggcttcaaacctttgacaacaactaattttaataatgctggagggagcaggagaagtttggaaacactgagaagtccaggccaatttcatctcatcctgccaccttgcacacctttccctgatgtgtaaggaaaactgagtaggaaagctatgggaacaagtcccatattgtcagacagggaaaggaaaagtaacctgattgctagagagagaccggggaaacaaaagccctgataatgtgccatttcacacttcgatcccagcctttgtagaggtggtggtgcagcctccaggcacatgatacttgacagcagacatggctcccatttctctgcaatacaattccaccagtttttaagtgaaaatatttaaacacttcagagtattttatcttgaaagcgcaggtccaaagtgatttgaagtaagttagggtttactttaatagactctagtgtttgagaggaaatgaaacattttgtttatgttttttattttaattatttaagaggaaaagactccctcccccgaccaagagacaaaattccaaaacattcttttatttccagctattctctacctaaatgagttaccgggttaaatgccttgttctcagtgtatatatcaacacctgaccaaagggggcgccattgttgagacagggccatgaactcttctcatggcaaacattcaataaagcatcattttcaacatgactgagtctacaacatacaaggcataaactggtctcttagtgtgaactttttttttgttttttaacttgtaccttcaagatttgagaaataaaggcagtggcactgctctttccactgtcatcgtggagggaaaggagaccaccaccactcacaggagcccagttcttccttccctattggtatgatgaggagaggcctttgtggtatgggatgatgaagttagggcaccactgaatgttcaggcagctcagccatttaataataagttgtctgggagggttgtaacctttgtggaatcagaggaaaccaaagatactctcaccctctacctccatatcagcaccagcaagtgaaaagcaagactgggatacccattctctcttcctgtctcttgtgcgtgcgtagattccactcgcaggggtaaaccatctccttcaaaagattttctcctaccttctcttgccaccctgctcatccacactcacctgccctcgcaagtatactcagtgtcactgcttccctccaggactttctggagaaggataggaatggctccattaagtataagacagtgaatctttcatgtgccctttaaatttgaagagcccacacaggcaaagcagcactcagttgaggtcattagaaaaatcataactgcttatatgtacaagctccactggtccaagccactcatgcttcagatgcaggtgtgcaggcccagtgaggctaagtggtgtatttgcacgagttctagcctccttactgggagaaccagcctggacccagcctcctgcttttgctccaaggctaaaaatcacccccgttattttatgaggcaccagttctgattcttggtgggttgtcagacttttgagataggacaaagttcgtgtgtgtgtatcagaaattccttctactagactgaatattctagtagtaatgtgactttgaactttggactttattaaaatccagctaaaaactattacacagactttaaaaattaacctgtttgtgcaggcttcttggagataacagcccagttgactcctcctgctaagctatttaacccatacgtgaaataattcccttaaagaactctatgtttacttagttcaacagaaatgaggatttctttttttttagagacagagtctcattctgtcacccaggctagtgtacagtggtgcaatcatagctcactgcagcctcaaactcctgggctcaaatgatcctcccacctcagcctccccagtggctagaactacaggtgcatgccaccatgctcagctacttttttctattgtttataaagagaccgtcttgctatattgcccaggctggtctcgaactcctggcctcaagcaatccatccatctcagcctcccaaagcactgggattataggtgtgaactaccgcacctggccagaagtggggatttctgctcctaagtcctaaaggcggatgctgtgttccttaagtccaatgatgctcagagattgctgggggcaatgtcatcatagtcatcatcatcataatagcaaacacatatgtggcatttatgataccaggcactgttctcaatattttacatgaattaattcacttatcataactttttttgagataagtactaataatatccccattgaatgcagccagggaaactgagacacatagaagttaagtaatttgtccaagttagtaagtgatgcaactcaaagtaaaggaagagggtagcttttggaaatagggcagggccaatgcaaattttaggccaaattgcgtttagggagtctgatgattaccaaaaacttttaacccaactgattataatagctaatgtaacaatctttccagcattttgaattcccccaacacaatttaacatataaacaggttcaatctgggaagataaagtatttagtgactctgatagtagaactagtattatcagactgtaggtaccaatcattaccatttatttctccatgccaacccttgggaaatcagttttactaaccttaggtgtttttattttataagagacagaactacattactatcagcagagattcaagcaataaagttatataaatgtactttaaactcattagaacactcagcaaacagtgaggtaatattcaacataggtgaagtgttttcactcttaaataagtgtgtaattaagcatattgattctttggtcatgctaacttaagacactacgaatccttctttgaagactcattttaagtaaacattattttctcttcaaagggtgccacttgaagaagatatgaaatatattaccagctttgtagttctgcacaagtgggcccatcttttaggcccaaagttattctcttgaatatctctgagttttttctcccagcaaggcatactgggaaaaagtactctgtttaataactaatttcattaaacttgaacactattccattctggagatctggagatttctctgactgttattttagatgccaatatcagggaatagactgtacagtctattaaatctggatcttacttttaaattgaatgtgatttcttttatttatcaacctctaattaatagttggttgagtactttataaaaaaaagcacttctggcaggtgcggtggcccatgcctgtaataccagcactttgggaggctgaggtaggcgaatcatctgaggtcaggagtttgagaccagcctggtcaacatggcaaaaccctgtctctactaaaaatacaaaaattatccaggtgtggtgtcatacacctgtagtcccagctactcaggaggctgaggcaggagaatcacttgaacgtgagaggcagaggttgcagtgagctgagatcatgccattgcactccagcctgggtgacagagcaagactccatctaaaaaaaaaaaaataatgataataaaataagcacttccttctagttgccagcaagaaaaagagaactgccatttatattccttataaatatttcatacctttctgtcttaatttttgttttcatctttttaatactgatttttctacctggaaaagtactgtatggagtttgtttatatcttcatgcaggtcagcctcattctcttcaattcattccttaggagtgtcctttatttcattacatttttctggcaaggtttcttcttagatgagatcatatttatgcctccacagatttatttgattgatctgagaaagagaagaatatccgctctccaaacctccctttctgtccctcaaaagtgcagacttgaaggtggccatattgcagctcttgtccagaaccttcatcacgcattcactcatgcaccaaacacacagctcaggtagtgtgctcatgatgcaaagatggctcaggcacgttgatgctgctgatgattttcagtgggaagaagcaaggatatgcatggaagcacttaacaaggaggtgcacagagtgtcctgctgtcactatttctagtccacagtgtggccaacgctgattcatcctggggcaaccccaagcacagtaggctacctttatttctaggtaaaatattttaaaagcttgaatgtagcttagaaatttagagcggaaaaaaaaaataccagtgattcagtactttaaaaacatggaataaagtgaaaaactgctttgaccagggcagcactagagagtggtgcatacaaaagtgccctgtcatgtttgagtgttgaagaacatgctctccattgtgttctgtgtggtgagggcacctctcaggcctggagagtatgtatgcagggactgccgggcaaaggctcagtcctgggatccactcctgtatctcccctgtgcaccacaggagagcaacagagagcacaaaacagatcattcctgctctgggcaggacaggaagggtgacccgagtttcatcaaggtctcctggagtgccttggaaaagcatgctatagagtcataagcttaattattgatgactctgaacaatttcttggaactttcagcaagaacatgcgtgcttaactcatgaatcacggctgaagtccaccattaatttctgccacattgtggccttactgccataatcgtaggtatggtatctctcgccagctctcccctgccaggtctctggcgtggggtttatctttgaggaaatattgcctttctagaggaagataaatttgcatctgggtgtgaacttaattctttaaagttaaatgtctaagtccttgagttaacgacaaaggtacacatatacttatatgttcttattccttggaaagcagcgttcaaaagtgattctgaaactactggttacaaagtttgcctaatcaaagttcacttcatcatataaaaatcttgctcatttctacgaaatgcactccctgttacctatccaaccttggttttactttcctccagcttgcatcttctgccttatttaagtggctcacctcagtgtcccccaacatacattattctcatcctagcctgagtttttcactgtcatcctacatatctgaactatcctttccccagagtgattttctcctaatttttaaaggcccagctatggtttccttattccaatagcccttctagatgtgattcccataggggtctttttcttccctgcgtccttttggtctgctatgtaatgttacatataaattgtgcaaaaatgctttcatgtgcataactaccttctgctacctcaattgcacgttgatgatgatgatgcctttgaacccattatgcctaatatagtgctacaactgttttctgattagtggatgatccctatgccagccaattggaccttaaaaaaagaaaaagtcccagcatttcagaaattacacatttgcttttctttggatcgccgttttatctgtggattcatttcttttgtttggcaggtcaaaaaaattccagtcatttattgagagctgcttggtaaagaatcacagccagcgaccagcaacagaacaattgatgaagcatccatttatacgagaccaacctaatgagcgacaggtccgcattcaactcaaggaccatattgatagaacaaagaagaagcgaggagaaaaaggttagacgcacatttgtatttcagcagcagaaacaaaagatggagtgaatcatgggcgcttgatgtatttggaggtgactatggggatttcaaatgggcctgcattattctttagtgcgaggggctgtctctgagaccacagcctctgggcatcagtggcgtgagactattgaagtagaatctttcatgaaaaaaatagaactgcaagaaacattacctctgccaggcactgaacaaagtcatgttgaatgatactatgaagtactttaatatgacaagtgattttcttaattcaaattaatattcatgtttagaagactaaaactctacagaagacagataacctaaagaaaaaaattcatctagttgacatttttctgtactgacattcttcaacatttaaatttatgtgctctgaggctcatttctaattctgttatttagaagtcagaaataatttttttatagttgcagtgatagaaaagatcattaggttgccaggcttgctgaatggaacatcagatttttgagctgaaggtcatttaacacacttctttattttatatatgcaaaagcacatctttgtgactctagctcttatatgtcactgtctcttcactgcatcattgaaagaacatgagtccaaacttggagtctcaggctgcaccctacctttttgaatggaagcttacatttttaactagcatagaaatggtatgctaatactgtatattagggaacattgaggtgagctgccaaatgagacaaaatgcaagccaaagaaaagtgaaactaaggttggatgggtaaggggagtgcattttgtagaaatgagcaagattcttatatggtgaagagaattttcattaggcaaattttgaaaccagtaatttcagaatcacttttgaactttgcattccaattaacaactcatgagtcatagctaaggttcaccactaatttctactacattgtgtgcttgctgccataatcatcggtatggtatctctcaccagcactcccctaccctgtgcctctctggcataggatttatctttgaggaaacagtacctttctaaaggaagacaaatttgttcttggagattgactagcatattgactgcgccatgaccaaggtaaaaacttgcatggtctggagcaggtttaatggctagctgaggtagggcaagttagagtatgggaagagagaaatggagaggacagcagtgagggctttctgggtagacagcaggagggggttgctgctgggaggatagcagtgaaaggcagtgtgaggctggaaagctgagcattaacagtgtggtgagtggacagtagagaggaagaccagagactgaggatgggaggggaggcacatggtgatgtgcttgttcttgcttccttcctctccatttctctcctctcttcagttcagaggcagtagcggagggtagcccacagacaggacagaggctgcctttctgttatttgcatttcctttcttctttgcctctgcagttaatacccataacacaagctggggactagcggtgggggcggtgagcagtatgaaagttgagactggattggagaggtaagatcagcagagggctaaggcaggatgagagaatctcagtgaaggttccagaaagagttcctttttttttttttttttttttgagatgagttctaactttgttgctcaggctggtctcaaactcctgggctcaagggatcctccacctcagcctctcaaagtgctgggattataggcatgagccacccacccagcactttttttattttttattttttgagacaggctctgtctctgttgctcaggctggagtgctcactgcaacctctatctcccgggctcaagtgatcctcccatcttagcctcccaagtagctgggactacaggtgcacaccaccatgcctggctgattttatatttttttagatttttagtagagacgaggtctcactatgttgcccaggctggtcttgaactgctgaactcaagaaatcctcctgcctcagcctcccaaagtgctggtattataggcatgggccaccaaacccagccccagggaagaattcttatgcagctagcagggacttgaaggaatgtatgatcagcttagactatcatacattgttgtgaagctaggccaaaacggtggctcatctgcagttaataagatgtcaattagaccctaaggagctgggaggccagcccaagctggaggaactaggcatgaagagaaatacataggtcaaactcaaaagttccaggactgatttttcaattgctccttgtccatggtggtcttgggctactccatgaagtcagaatttttaagggcatattttagggcagtgtgtcagacatgcaaccattaaatgctaacttctctcaaaaggacattttattatacggtgaatatatagcatagtttaagtgctcagactgttttcagattcatattctgggttcaaattctaactctgccccttatcagttatgtgaacatcactccagttttctcatctttaaaataagattgagagtatactactaatatctactgcctcaaatagttgcaaagattaaacgaggtaatgcatttaaaatgcttgacataatgtccaggacatagatgcactcagtaaatatcagttattcttatgtaggcaattacttattgacccatactttttcatcacttactcagagtactttgtgagaactcatgacccatctccctctggggcataaataagagtgattgaagcctgtgcctcaggttgtttccacattttgtggggcacaaactctggaatgtgactcagaactcaccatgccatgaagatagatcatttttaatgtgtttgttctctgcagagtggaaaagtaagattcttgggaataggtatgttcaagagttatgtagtaatttaaggaatctaagcctgtttaggcttagggccaccagaatcacagttctagtctcctttttgtctgctccccaaggaatggtgtttgatcaaatgagatctaattccatttgttcagtttaatcaaatgacttagtttgctctaatattacttttcactttcttagttgttctatgaccaacttttggtagaatcaatcaaagcaattctattttgcattatttgtgatttttttcaacctgatattttttccctaacatatgctgacacatgccaaatttaacccagtaatataaaagcagtcaaaagcaaattttggtgaagtattaaatattaaattgagaagcctgacaaatgaaggatttaccctagagagtagaagtaattggaataattgtgtgcttcttttccttgctgtaatttcctttattagataaaatttctgcatttttactttgaaatctgtttattcattttgaaaaagtttggaatatttcatttttagggtggagtattaaaatgctttatgcaggttctttatattttggtgaactaatattttaaaaataagtagcctgaaagcttcatacatacctaaatgtatgaagctaagttgtgattttaaaaatacacttgaactcatcaaacttttggctttccttcattatctctttaatggctagtgtgaaaagcaaggcatgtttatcaaatctgagcattctcactgtgtgactgctgcctcctggtggtaacataactaaattgcagtttcagtttctttttagggatgtgcaaatgtcttcaaggttgtaattattaacctacagctatgaagagataggagtaatgtgacaccttcctttgcttaaaagctcctccaagggttcctcattgccaataggaaagttctcagcatggcatttataagaatcagtgagccatttcatccctgccagcctttgtccctccataaggttttctcacacccaggcacctaactactcacagctcattgtttcctgaacatattatgcactgtaatactgccagccttactcatgtggatatgttgcttagagtgtccttttcccacaagtgccagctgctaactgcctggagaagggccactgaccttccaaagcccagttcattttttctccaaagacttcaagtctcttcctccattatgaccagtggcactagctgttcctttctttgatatctcattgctctttatatgtactgctatttagcatataatatgttggaaagagcactattttttaagttggaaaagttctggattgaattctaaatccaaatcctagattgaccttttattaatgagataacattggttatattacttaacctcttgtaatttcagtattcttgcttgaaaaatagacactaatttggagggttattatgaaaaataaatgagagaacagagtaaaatatctagcagtagtgactggtgtgggagatacccactaaatattccttccctttcttcacaatcatgaaggctctgatatttactcatctcacatattagatttgatctcttccaaagcaagcctcaatcttattcattcacacatgtaaactgcttcccattttgctgaattaaaggactgtccctagtggatcaatcaaaacacattttaaatatagatatacattttttaaattttaaatatatatttgagacggagtctcactctatcacccaggcttgagtgcagtggtgcgatcttggctcactgcaagctccaccttccaggttcatgccattctcctgcctcagcctcccaagtagctgggactaccggtgcctgtaaccacgcccagctaatttttttttgtatttttagtagagatggggtttcactgtgttagcctagatggtctcgatcttctgacctcatgatccgcccaccttggcctcccaaagtgctgggattacaggcgtgaaccaccgcacccggccactatatatttttaatagcacctattgtcaaaagtttctttgttgcacttagcaaaatagtctaaagacagtttgcaagtccatgtaagtcataataaaatcctactttaaaaatggttaataccatcaataagttacaaagggccaatgggtttgatatgggtggctttatagtgggaataacacaaacaaattattattattattatattattattttgagacagggcctcgctctgtcgcccatgctagagtgcagtggcacgatcttggctcactacaagctccccctcctgggtttgcgccattctcctgcctcagcctcccaagtagctgggactacaggcacccgccaccacgcccggctaattttttttgtatttttagtagagacggggttttgccatgttagccaggatggtctcgatctcctgaccttgtgatccgcccgcctcagcctcccaaagtgctgggattacaggcgtgagccaccgtgcccggccaaacaagttatttttaattgaaattaaattaataaaaaaattaaaaaattattttttaattccttctcatgtgaacactaggcactggggacagatatctagagtcagccgagacagccttgaatgtggttaatttcatatacttatgggaaccattaaatcacaagcctggagaccgttccagcgctgtgttaactacaactctttgggtgtctatttatttatatataagagacggggttgggctttactgagccatagcatctttttgtgcactaacatgctgggatctttcttcagatgagacagagtatgagtacagtggaagtgaggaagaagaggaggagaatgactcaggagagcccaggtatgagagcaaaagccaagtcttctaatgttcacattctgaattgtgcttgtgtgaaattcactttccttttgatttataggttcgtttttaagaatccaccagggtggtcttatttaatttattgcccatgaacatactcattaatttgggaaaatttccctaggcagaccattacgaaaatgtggaaatcagcatattctttatcttgtcccccaagatttatggtctctatcgtaagagcttgttttcttacatatgtaacacgtagaatgggtagaaggctaattatctgggcaatgcaggactaaaaatacttaaaactgcaactttctagagacctaagtggtattttcggacttgcgttattcagttcgttacttcacacctttgagaagcccattcgggtagccactgtccttgtcacatgccttggtattttcattgcagcctaatccaggagaaagtgattttcagaaaatcaaattatatgtagagatgaactccaaacaaatacttttgggccattcctgttgtcacctgttggacctcagaatccagggctgttttattgtcatgcctacattttgaattccacttgactttgattctgactttcttctagtctgtgtttataagtaattaaggttagtgtgcttgcactgccaggatatctctttggtgagcgaattcagcttgttgagtcaaggagggcaggcccacatcccatggtgccatgcagtatacatgtgaagtaagacttggggggaattgcacaagcagaagactcattgaggtgtggcctccctcctcaagccatccaaggagtggaccctaatgctccagaaggatcagttcctgtaccactgagggagagctttctgaccagaaaaggggccagcttagccaccactgctagaatgagccagataccatgtgttctttttttatgctaactcagacctactgagctggattcttgctaagcttctataagaagatggaactgagctttcagagccatccagtttttctctcttcacctgccacaggattcctcaaggtcaaagaccgaatacttctttcctaccatctgatacatagcatgttggccgtccccggtttagctgcataaagaagatgactgccaagtagtgacatagaaaatgaacattcctgaaaggcagaggaccaaacgccctgctttcagagaagttgtacaccagtgttcaaaagcttacccaaaaggttactgtgtcagccttctgaccactttctgtagaactgagaaaccctgtctttctaacacttgctaaactgcatattaggagtcactcaacgagccagcccagccgtaccttaacacttccgtaattataacatgtcattatatcatgctgaagattatgttccaagtcctgttgttgttgttattatactttaagtccaagtcctgtttttatggacgtatctaattaatcttcatgaaatcctgaaaaatagaaaaggacaatggttatctcattttagaaatgaggcgacagcctaagggttgcacccaggtcacacacagagttaatggttgagtcactaacacagctcagatcttctgacattgattcaatatcaattaatattaatggagcatcctcgtgtgcatgggaggctgggttcccaagtccctcccctctgcacagggcaagtggcctgtgtagataagcaccatcgtttggggttttagagtttgacacaaaggctctaagttttagagaaggcttgtgagtagacgccaagcattgtctatggaacatcacgaacaaagcctttttatgtcttttcatggcagtatctcacacagcacactaactactctccaaaaccgatccttggtcctcttgttaactgccacgaaacttgctcctccctcagcattcctcattcctgttctcgttaccaccgtcacccagccaccaagacagaacctgcaagtcatccctcactccacatgtcagatctgtccacaggcttcgtgacctctatccccaaacgctccttccctcctccacccgctctgctctcgccctgggtggtgtccccaccccagaaccactctgcagcagcagtccggcttgctgtgcttgcccctgtacccctcgctaggtcatccatttagcagccaaacccatctgctcatgttgctcttctgcataaaaccttcccgtgcctgcatggctgtcgcggccccgcacctatctctctgacctcctctcatacccttctccctctcattcactctgctctgggaagccgggctggtgttcagttgctcaaaaatagggtgcacccctgttttcctctcaggcctctaaacctgcttttccctctgcctggaacgttcttccttcttcatcaactgcttccttcccagagaggtctttctgaccacccatctaaagtaaggcctcaaagcttacctcagctcccagccactgtcactgaaacaattacaattttagtcttctatagagcctattaatacctgaaattatttgtctgtatgtgtgtcccataagaagataactttaaagggagaatttatctagcaactgccgtatccttagagcttactacagtgactgccacatagcaggtgctccgtaaatatgtgtttaatagatttatttcaaatggaagcttccagaaagattaaaagggctacgtttgaataaacagaagtcatttcttagctccctcttaggctgctgtgcagaatcaaggagtctgtaacatttagttgttcacctgcgagcagggcagcccaggaccaccagcgaagtaggtagaacttatttatgtcctctcgatctctgtcgtatgcacacacattcatgtacaaccaccattttacagaagacaaaactgttacctaaacagaatctaggaaccaatgagctgggttgaagtcctagctgcacctgctgtggccagagccaaaccaagccctttaagtgtggtacagtcaggcaaaccctgacttggactcagcaggcttgggctcagatcctggctctgtgttgaccttgactcaagggttttccatcgctagttcatcgtggcttcacaggagcagcctggcctctgcctcatggggtttggtgtgagggggtggtgtgggtgaggccgatctgtgcttgtctgagtacccttgttgcccaccattgtccatttttattgaaaataatccagtctggggctcatggcttgcacactggctaaagtctttaaaaacaaatctttgccacgtcccaaggatgagggagtggtgtggacagtcctggagaaggtgacaactctgagaatgtgacatccctctatggatggaggcagcatttgttggccacagtcgtactgaaagggaggcaggtctcttatcctgatgctgtttctttggggtgaatgattgaattagcggaggatctaggagcctgtgctcttctttccctgtgtgtgggtgaatcatttgtcccgctttcctcctccaaggcctcttggtagccatggcccctgccccacgtgggatcctgatcactctctcctacccacagctccatcctgaatctgccaggggagtcgacgctgcggagggactttctgaggctgcagctggccaacaaggagcgttctgaggccctacggaggcagcagctggagcagcagcagcgggagaatgaggagcacaagcggcagctgctggccgagcgtcagaagcgcatcgaggagcagaaagagcagaggcggcggctggaggaggtgaggacctgctcgggccacctctgaccccaagcctctcagttgtggtcactctccaagcattccctgggggcccacatcccacctgtgagcacacagagcttagaggcacaaaggggttgactgcaagggcagataagtcctgaatgctcttacaaacaaaaggcttcccttgctttttgtggtggtgtggtcatttcagaaaagcaggtgaaggccgtcaccccttcctgtcttgcccatatatcaccttctcagcaccttctcagctttacttaaagtcacagtccctccctccagcatgtcctatttccctgccctgccttattacttttacacagcccttagcaccttcaaatatagtctacatatacttttacatgcctgaatgtccctactggaatttaagctccatcaggacaaggagattttatctcttttattccctgatgtatctctagcatgtcgtaggtgcctcataaatatctgtggaatgagtaatatatgaatgaatgggtcagtagttgagaggtgaaatataggtattaactagatcacagtgaataagcagataagtggaatttcaagtatggaagagtaggacctgcctattgatgctctgaatgctaggaagaatgtttcacagatcctttcccagacatcccttagtacccagggcctgtcctccagcctgtgggcaagacctgcctttagcagcagatactgcttatctgtgtgggaagccatactgctagccacagttggctgcatgccttgtcctgggccagactctcaccttgtggtcttacagacatttgttaaagcctccttcccagaactttgcccagatatctcaggcctccttcctctgccagataaatcaaagcctctagacaattaggaaaccgagagagcatatctattggggaagttgggcagcagatgaaaggcgcactaactgcacggtaatgggatagtaattttacaggtttcccgaacaccagcttgcttctcattaacgggcttgcagcaattcacttgctttgccaggtggccactgaagatttagagggtggtgaattgcagtcaccagcagcagattgctttttaaatggtacatcaaggtccagcctccctggtttaaatcagtaagggcctcagttccagtttgcagcaaatcccatcaacctcattatgtccttcaaatatcagtatcagaccagcaacaataatacccaatggttacaattattgagtgattttagtaatgtcaagtaccaggcaggatgctttgcttatagccactatctcatctactatcattatctcttttcctgtattgattatctctcatgcaaaactcataatccccatttaacaaagaagaaactgaggttcagggagggaagtaattggtcccatgttgcagggtactgtgtttagtactttacacgaattgtctcatttaatcctcacaataatctccagtctaaagataatgcagctgagtcttagagaggttaataacttgttaaaggttgagaagaaaaccgggtttcagatccaggggattggcctgcagagcctaagcaccaagtcactgcatgtgttctgtgtctccactgataagtcaaagttggtatgcttttccacatccctcatctggcctctatgtctatagtcttttatcctgaacatttaaggagttctgcgcaagggcacagaatctgtggccaacagatgctcgcctttgacctgggttctgtctcacgctcccagtcagagctattgccaaggcctcctttgtgtctcttctcttgtggcatttgcttgaacctctaccatggagcaagtcagagttcagctcactgaggcatgtgcagccagagacacaccctgtcaatcctggcttgcacagaagacgtcagccagcatgcatgagggcacaagccttttgctgtatgtaccaatgggcatgagccttggctccataccagaagcaggaatgcttctggccacagagcattgatagattattccagctttctcttttgatccttcatcttattctatagcgcagtggagaagaacaaggaatactaagtactcagagagctgtaaattctgaaccccttagtcatgacattctctcccaccaggaactcttctgctgtgtcctgctcctgccaggtccccttctatgtctgcttccctggcctttggtgaccacttgtgtttctggtgtcctgagtaggaacttggactacattgtcatatagaaactgttaaagcccatagttcagcttgagtatttcactgcgagtcatttttccttttgtaggaaaaacattcccacttagctacccctttggtcacacaggactatgtagcttgtagcttttgtattttgtgatctcaaatgtcacctcccaccagagggtttctaaggaagccctgcatgtcctttactatttatgagtaaccatgtggatttggctaagctctaaatcagtgtctgtatattcttagaaggactttgaatatacactgaatgttgtcactgatcagctttatgaaaaggacgtggcttcaggccaattaaatggtggagagaagactcagcttttgaccattgttgaagtacaacctataacaaagttccaggaacttgattaaacccagctaaagtgaatgagtccatcaatggtgagaaaaagtacaaggaggacctcttctagttttactcagctcaataaaaatttctattacttggcataaacaaaatacatcttgttttattctgtatcatggagttaggatccaagaataatgggagccttcaggggtcaaggcttctactctggtaatcttgagcaagtttgtggtgatgtttgattctgctcaagagttctgaaatgatattagtgatttatatatgtgtttcaaattgctgagcacattctatactttcattttggggagcgtgcctgtaagtcacaggaatgaatcaaatagaccccagaagcacctgctccctggtagtatgttttattctttcaagactctttcaggacaccaacattctcatgtagtgcccttcaagaccatcctaacattgtccagttataaaaataaccagttctatctggccaaaaaatatacactttggctccatcccatgaatttttttttttttttttgaagagatatcacctgtatcttattggccagtaatcatggagcattaatgtacaaagtaagaacctggcagcctaaaaatgtcagccctctctaagcctctaactttttattgtgactgaggctttcaaggatgttagactcaattgttgttgttgtttttaagcatgaggtttttaagcataaggttgaattaaaaccttttcctggggtctgtaggtcatcatttgacaaatattcagtgaacacctctgttgtgtgggcaccatgttagacactagaaatacagtctcccattgtgacgattagatctgtgagggaaacaggcactaagcaaataatcagccaagtaatcatttatcatcacagcaatgactgccgtggtggaggagagtggcatgctaaaagagcgtgccacagggtgggagcctcacctggcttggtcagagtcccgctacaggagggagtggggcacggagagataccaggcagggaagccatggcacagtcatgcagggctttgtagaccatgttgattacttttgaattttattctaagaagagtgggaaaccattgatgtgtcttcactaagggaacagaatcagatctgcctttttcaaatgaaacttgggctgctgcagttggtgctggaaagaagcaagagtaaatggaggagacaagttagtctaggccagagagtgtgatgctttggacagatgatggtggagtggggattgagaaaagtggacacatttgagacaaatgtagcctgtggaccatgcaggatgtgcaagttgattagacatcagggatgaggaagagcagccaacagtaatagtagtagtacaatccatgcagttggattatggtagagatggccatagaagaggggtcaaaaataagaaaaataggaattattggtttgtggtaataaaagtacacatgagaagagagtgtaggcctgagctctaagaactcagaatagacaaggaagagacagcagagaaatttgataaggaagtggaaggaacacctggagagtttgatgctatagaagcaaagatttagtatgcaagcataaggatggagttaaaggggccagctctgcagaatgctgctcagaggtcaggaagacaatagcatcttttggtttcaaatgacaaagaggatatttaaaacatagttttggccgggcgcagtggctcacgcccactgtaatcccagcattttgggaggccgaggcaggtggatcacgagatcaggagatcaagaccatcctggataacacggtgaaaccccgtctctactaaaaatacaaaaaaatagccgggtgtggtggcaggcgcctgtagtcccagctactcgggaagctgaggcaggagaatggcatgaacccgggaggcggagtttgcagtgagccaagatcatgccactgcactccagcctgggcaacagagcaagactccgtctcaaaaaaaaaaaaacaaaaaacaaaaaacaaaacacatagtttttgtgtagtactccctagaaattctttcatttcctgtcttttctgggaagggaagcaacctgcccagggagtcagtagatctgcacttggagtgaaaagacgtcaacttctgagggtcaccatgtactactactacctgcatgccctggcagttcttattctctccacacctccacttcctgagctctgcagggagatcagtagcaaagcttgttcccaccaccaaagttttcctgaggattaaccagaaaaatggatataaaagaactttattgactgccaaaagctggacagaccttacttttgaggactggtcaaattcagcttaaatatttctaatgagacccaccttatgcttgtgttggaattcttcctaattccatgctcatccatttgctatcagctttttgttcacattctctgttaccatgcattcttccttttttctttttttttaattaatttattttttgagatggagtctactctgtcacccaggttggaggcacgatcatctcagctcactgcaacctctgcctcccagattcaagcaatccttatgcctcagccatccgagtagctgggattacaggcatgctccaccacgcccagctagtctttgtgtttttagtagagatagggttttgtcatattagccaggctggtctcaaactcctggcctcaagtgatctgcctgcctcggtctcccagagtgctgggattacaggtgtgaaccaccatgcccggtcaccattcactcttctcttagggtaaccaagcccagtctcaaagcagctcagctgtgcaagctgaagcccaaacccagagaagccgctggtgtggaaggttgttctttggaaccttagtagcttcttccaaatgctcctagacagcctccacccacaaaagagtggtgaggtggtggggaagctgcaagtttctctaagaatcacagtgcaggacagcatattgatgctctggaaagtcctgggacagcagagcatttggtaaaattcagtagagagtgaaattgtattttggttaacagcatagactctagagcctaagactgccaggggtcaaatcccagctttcttccttattaggtgtgtgacctgagtaagttctttaactttcctgttttacagtttcctcatctgtaaagcaagaaataacaatagcatttacctcacagggctgttgtgaaaattaaatgagttaattcatacaaagcctgccgacatcactaacacatagtgagccctcaataaatatgagttgttcttgttattggtgtaggtgcctttgaccaaagtcaaggaaacaaatttccaaagtttgaactcctttatgtgctacagtaaaacctttttggatttattaaaataaatgtaaataggtaagcttctttctatgcttcgggaagaatatttgttataatactgggaggaattcagttatatcattaagagcaataaatgtctaatagttcttagatggccagctttaggttcgtgtagaggtaaaatacactatctttacaggccaaggccaaggtttaatcttagctgtgtggtctttggcaaattacttaacctctctgaacctcagcttccttacatgcacatttggtaaaataatatttacttttcatgattgctgagaagtaaatgaaaccataaatacagaggacttggcacaatgcctaacacaaaacctggattggtattcttgggtgaatattttattgttattttggaactgatgatttcaaagtatagtactgttaattttgtttttcattttaatggtgctgtctatagctagcatttccccattccctgtcttccttaattccttaatgtaccttccctgtttagtgtaaaaccttgactttttcatccccttttgaaagcatttttccagagcacattttcgttatgtcttactgggctgtttatctgctggtgagttagcctgcagtcctggccttgtcaggacaaggaggcggcccattctttgtccttttgcggatttcttgtttagtagggtcaactgccaccttgggaagtctccttttcccagtgaaacctagagaaccttcccctggagaaactgccttctgatggattatcttatcagtatttcttgctgtcatttccaacactgtaaattatgatcccatcattgccaccaagtggctgcatgaaatttcatttcctaacaatatctaaataaagttcataaggaacagagatcttgtgctgagtgaataacaagcttcttgcatcagggaaatagtaccttccgagtgaccctttcaccaaaagggtgagaacgtggcagttcagtaagacactgcctgggtttgaatctcagatctgccacttacttcctttgtaattttgagcaagacatgacttctctatgtctcagtttgaccatttataaaatgggatgtaatacatacaaaccacttagaacagtacctggcactgagtaaacacctgaataagttcaaggagagtgttacatgtgaagggaagaatcttgcttctcattacctgctttgttattgctgccctgggtcatctctttccagggtgaggccttgaagctgaatgaagcctaggcaagtacagtgggcacaagaaggagacaggaaaatcgtgtgggttttttaccagtgcagcatttctacccactggaccacactcccaggccccaagccagaggaaagcactgtgagcaagaaaaattaattcccccatctcagagcctggagtgttaacacatcagcactgctgagaagtggtccttaattcacttaatcattaaccacaggtgtcccagtgtgtcctgtgagcagtggctggctagttggaggcagcacagctttttattcctggatgtcattagcatcaacacaagattgaacactttctagctgggcttttgctctgttatttcaataactgaacagaaattatgaaacagctgggaaccatcctggcaaaccagatgctcattgtccaggacaaagcgtgcccatgagctttggataatggtcagtaatcgcatgcacatgtaaatcacacttgtgtttcagggagccgtgtcatctgcatggatataaggaaccccacctcccagtggatcgcaaaagggcttcttgttctaacttacgtgttgtgccaaaggagttctgactttgtccgctttgtcacctggatcctgtgatgggagggatttcctgccacagtgcgggagttgggctgacatccctattttgtagtgtaaaatgctactgaaatctggagtccttttgcccaggctcctgcctacgcttttaagacataggaaggtagagtacgctagtgttttatacttaacagcatttcatactgaaaaaaaacctggagttaggcagttgctgatccttggtgtatctagagtaccttgcatggaaggtagggatggctttttagtgcctgcatgcaatggacatcacacagacctaccctccgttgtctaaggtcttcacagaaccacctttattacatctagtctgtatgttttgtgtgttcacagtcttcttagttattcctaaccatagaactatgacaacaaaatagtttcacatgaaatcttatttcacatgacatttaaattgaattgcttttattttgattcttgttttctttagtaagtggttttatagaatcatagaggctggggaatattaggaacctcaaaagtgatctcagccaattcttctctcaaagcaagaattccttttgcaatattcttcaaacagggttatctaacctgtttaacatataatctttccttgtatgtccgtgggcttgaggcagcacattctatttttgaacaactcctaatgttggaaaagttatcttttcgttgattcgagttcttgtgatatccctgcattaatacaggttgtgccaaataaaactgaaattccctgcatatctgccctagaaatgtgtgaagacattaataatgttttcccacaaatgttaccagttcctgcaacctttctacgtataagttagcatctttagtatcatctcgggagtactggagtggccctctctgtaaatactgtattaataaactggtttataactggcttgtcttcataggactcagtctgagggtctcatactaaggcttcagaatgatgacagtaggaatttgggggtttcatctgcatttgactttcacactaacattcagagtcgtaggtactagggatgtccattaggccattcttgctcctctgtatgacacctgggaaatcccgtgtgactgttctcccaggagaaactgaggctcagagacactaaggagtttgtgaataatcacattgactagcatccatggaagaggcaggatgagaattcttctgcaccgcttcgtgaagctcagtctgtttagaactgtcatgcctctttcagtgtccgcaaagaccagcttgcacacatgtgcttgacagtgcttagccatggggctgtctgctaatcaaaagttggcctgtgagcacaaagaaaaggcttcacttaggcagttaatttttcaggaaagctctcaaagggtaggttggatagtttatctctcatggtgtaaagtaggtgtagaaagaaaggaatgagttatatctggcctgtctagctttcccaatgttctctgattactatttctgagaacattgggaaagctatggtagctttaaggtaggtaacaagttaaggtaggtaacaagtaaagatagaaagaggggaaaatggcaactttaaaaagcattagacagtatcttttactttgtacacacagatgcttcttgtggacccaaatgaggcagcatggcaagagtcaggcatggaatataaatcctggcctcgcacttaccaaccgagtgaacttgggcaagatattggcctggatgtgcctcagtttccttaactgtcaaatgggggtgatgacagtattacctgcctcaaagggttctggtgagaattaaatgagttaatatgagtacagtgcttggcatcataggctgcactacgtaagtgttcttcattatgcatatagttattattatttttgtttttatttcattgtcatatagtgaattcagaggtgccagactgcttcctcatcactcttgtgtccttacataaaaaaaggtttggaactccagttttagtcacaaggaatcatgcccttaccctatagtcattggtttgcaatgatctttccaaaactaaaactttagcaacgttaaatgggaaaatggaatgcccagaagctggaatacctctcatcacaagtatagctcccgtgaagcttatacagaatggtcctatttaaagtgagggggcatgtgtgatgtgcagtcaattcaaaagaccacactgggtcctttcattctgagtgtctttgaacagagagcccctgggtggaggggatggtttgaggtacttcccaaggagcctgacttgatcttgcaccagccgttttcctgtcctctggaggccaactcgggtcttccacagtcacagtagggtttcctctcaccgctttcaggaggtcacccaagatgaaaagcaacaggagctctccaagggcaaataagaattctgcttcgtttcactctgaatggttagatttttgctttgcaatgtagcataaccttgctcagactcttagaatgaacagatttgcaagattacttaatctataccctcattgaaagtttagctgaaggtgacttactcaaggtcaaacaacattcactcattcgtcacttttttttttttttttttttgagatgaagtctcactctgtcacccaggcacaatctcgtacagtggcacgatctcagctcactgcaacctccgcctcctgggttcaagcaattctcctgcctcagcctcctgagtagctgggattagaggcacgcaccatcacacccagctaatttttgtatttttagtagagacgggttttcaccatgttggccaggctggtgtcaaactcctgacctcaggtgatccgctcgccttggcctcccagagtgctgggattacaggtgtgagcccggccatcaaacacatatttacagagcgctgctacgtggtcttcagtgttcgtattggtggcagtgcaggaccagaatctagtctgtttccaaaccattttattctttccccaagccctgttgcctctcttgcctacccctctatcccaatgacacgttgcattgcagctataggatattaattctcagatgtggatatcacttgggtccatataatgggaaatatgatgtatataaaagatggaccagggccaagatttgtttctcattttttggcttattatgacttttcctcattccaaaaggaggagttaaggtggcttaaagagattaatacagcaattaaaagtaaaataaacaagaagacaatgtagaagggaacataaagtagaacggagaaagaagatgcaggcaggagcggggtcagtgcacagaatgcctgcacaacatggcatccagcgctgttgcccagggcggtcaccaatctgctctgaggcctgacacatgagaaaagagacagatgtgaagtggttgagattcatgttgtccatcagataagagtaaaccagttactcagacaagctttctgagatcacactgaaaactatacacttgcctagtaagtagtgcaatgaataatgtctgaggcaatattcctggcataaatgcagtggttagctttattcagctattttgaagacatcataaaatgcaattttatggcattgcagttcatcaaagtcacttctatgagagctagaacaccctggtgtaggtgcgtacttttctgcttatctaaagtaatctaagaagagcatttaaacaaaaaaaaaaaaaaaaaggaaagactgactccacagcccttgtgaggaatatgcatgaggattatctcttaaaactagacctctaatgacaattcagaatttaagggttgaggtgatattctctgcaaagaatttaaacagcaaaaattctacatagccaatttgggataaatgcattacctttgagggccccctgaacaggtgggacaaaattactattccctcattaaaattaactaacaaattcacatgcttgaaagtgcagccacacagcctccacctagaggtagcgtgaggggagcattcatagggaggatcaaaactgcccccaatagatccccagatccagcaatcccaccactgggtgtatagccagaggaagggaagtctgtgtgttcaagagatagctgtggccgggtgcggtggctcacacctgtaatcccagcactttgggaggccgaggcgggcggatcatgaggtcaggagatcgagaccatcctggctaacacggtgataccccgtctctactaaaaatccaaaaaattagccaggcgtggtggcgggcgcctgtagtcccagctactcgggaggctgaggcaggagaatggcgtgaacccgggaggtggagcttgaagcgagctgagattgcaccactgtactccagcctgggcgacagagcaagactccatctcaaaaaaaaaaaaaaaagagagagatagctgtgctcctttgtttattgcagcactattcacaatagaccagatatggaatgaacccaagtgtccatcagtggatgcgtgaataaagaaaatgtggtacttacatacaatgaagtactattcatccataaaaaagtgagattctgttgtttgcagcaacgtagatgaacctggaagacattatatcaagtgaaagattccaggcacagaaagacaaataccatatgatctcactcactggtggaatctaagatgtcactctcatagaaagaaagagtagaacagtggttaccagaggattggcagggggcagtggtgagagactggtcaatgggtgcaaagctatagacgagaggaataagtgctggtgttctattgcataagaggatggctgaaattcacaatgtattacatatttcaaaatagctataaaaggtttttgaatactctcgtcacaaagcaatggtaagtgtttaagatggtagatatgctaattacactgacttgatcattacataatttatacatgtatgtaaacatcacattgtaccccataaatatgtccaattattacatgtcaatcataaatatttaaaataagaacttttaaatatttcatgcctttctctaatgtctaaaataagaaatttaaaatatcttaaaataaaaataaaaaggaattgtcctaaaaagaaatcatccttggcgaacatcaacagaagacaaaagggacatgaagtccctgattatctactccatagagtaaggcaacaattgttagggcctggaaaactttaacagtaggttctatccatcatctccccaccggaaaaaaaattaagaaacttataagaagcaactgaatgtccaattttaaggaatataacttttagcaatgcctacaagaagacatggatgaaaatatacttctaggcagttcaatataggtggagaatctgccaacagttttagagtagttggtttcagccattcttttctgatagcaggaccactatcttcattatgtataatttgaataagatctaggaatgctatttgattctcccctttccctttttttccagtttagactcttattcccttatttttcatgcctttctctaagatggcaaacaggtacattccagtgccaactgtaggtggctctttttagaagaacattctccagttctgtctgtgttcaatataaaagaatgttccagccaataagagctacttaagaagggcatcaaagagtaaaggtctggtacaaagctctgcagggctctcccctcttctattacttagccagtttgcagtattcaacacaacaaatatcactggtggctggcctgatatggaaacaatgggagataaaaacaagtggaacagagatcttgcccacacacggctttcaatctagattgcaaagttggtaagatatactcaaatagccatactataaggtatggaaaggtagccataccgtcagtattgacaggaggaaaaattctacaaagaaatttaagaggatactgtgttgtcttttccctcaagtttcttactatgttcagcgcaacaaactcttaggtgcacctgccaggtgccaggcccccgtctgaggggttggggtacagcagaaatcaagcactggccttgccctcagagagctgcttctagcaagagtcatcagagctttgtaaaggtgtctgcctgaggccagggacttggtcttgcattgatatgttttttttatatcccctccctcatacggctccatgcacaggaggagagaaagcaaatattttttcaagaatggcattaacattgagacacagcagctggaaattggcagggtgccctcagaaggttgggaaagcgatttatttttccaacctcaccacaggaaccaaagccctggcagatgcctccatgtgttagcggctgctgatccgagtgagatcattattaattattagttacttttgagtgtctttctcagaaactacagagtacttgggaagcccagacgctcttgagttgcaatcaatactgtatacaccttgcacagggacctgagtggcatgtaattataaaacagtattgattcctggcaaaggggttcaaaatgtacaaatccttcacataaagatcagctaactcttcaaagggcttgattattttcctttccttaagaaagagacggatggttggagtaagaaatttgaaatattagctaaattagtgctatttcctgccaggatccagatctgtacacataattattttattctctgtgctggcactgattcactttggttgagtattggaaatgtctctgttttgggtctgtaatccaaattattcagtcagtgcctatgctgatgttttctactcgcatcttcctgtattatttttctgtaaaacaaatacttgcatgtctgggacttgcctcatgctggtacccaccccactcctacttttcctgctcttctctatcccatcgtccactgtgccccttggccggggacttcacctgccctcctacaacctgtcgtcaccaaatcctgcctattttattttggcctaattctaatttctgtttctaaattggtgtccactgaagtcctattagaatgaccagcaacctgtatagttgttagtctttattcctcttggctgtgtctccatcctcagcagtgattataaacatggactctcatcccgcctttgctgaaatcatcgatgccctatcattttatacctagatccacagaatggccttgcactgcttttcagcttctagtcttgccccttttcatggatgatggggaggccttttgaaaatgcaagtctgatcaagtcatttggctgcatgaagtcctccaatagctctccttcgcctgcaatccaagatggaaaaatcattgttgatctggaagtgacagaaactgagtcttaagagacgcagcttatctcccaagactcagaggttattggaagacagcaggtccggaggattgctgcaggagctccatcgggaaggtttccacatgggcttctctggcattctgaatatctgtggttggtttagctggggctgagacacagaacttgtgtaaaaaactatctccctggttgtgtagagctaacttatcagtgtgagacagtcacaatttattccactctgggtacctcatgtttcctaagctatgcaatgaagtcttgttgagaatgtgacaaggaaatggtccccctggtatgtcccctctgaacttcatatatgaggaaaaagaaatcccaaagccaataaaggatctgacacaaagggccagccgcctctctcaaaaggtgcactaatgccatgatgtatgggaaaagacttggtaatatgtgacaatcctgtgccttgcacaggatgtttggcatcactagcctctcatggtaaatgccagtcatgctcctcagtcatcagaaccagcaaaaatactcctcacatgtccttagatagttgcaaatgctccagagaggggtaatggcactgctcctacttgagaaccactggctcctgtaactgcttggcctagttctaacttctaaaatgttctcctttcctgagagtataatgaagagccagatactttgtgatctttctatcattcctctggcttcttggacttccttaatgattgagctcagatgctggagtcacatcgtctggctatgaaatcaagctctgccatttactgggtgtgaccttgaacaattacttaatctctccgtacctcagttttctcagataaaatggagataatagtgacatccacttatttttgtgaagatgaaatgaaataaagcatgtaagctgtttatcacactgtccactgttggaggcatggtaattgtatgaggtgatgacgatgattgacgatgacgatgatgatgatgatggctcccaagcataagggtcttattcgagcaagaacttgaaattgacacttaataatgaatactccagaaaacacagacaggcagcatgatatatgagaaaaggtagcagactaggtgggagtcagtaaatcctaaagcaccctctgccatcaattctgtatggctttgaatatgtcacttcaccgctctgatttttacatatctatgaaatttttgtgttacatggtgttaaacagattgaatgacttaagcattgtgaagtaatttcataaacaacttgatgatatgtaataaataacctgttttgcattggtgttttctacgcctgacttgaaaaccctcaccagctgtggggagaacacacttaacaggaacgtcttggtgagagtctacttacatggtaaatggaagtatgttatgcgtgacactgaatctctctctctcacccgctccctgccagtgtaccctccaacagccccggagagaagaaccttggagcatttaggcatatctcattaaaagttcatgtctggggttcaacagcttttcctgctggctccctgacaccccccaccggggcctgttgccttcatggttgtctgcttgttgccccacagcaacaaaggcgagagaaggagctgcggaagcagcaggagagggagcagcgccggcactatgaggagcagatgcgccgggaggaggagaggaggcgtgcggagcatgaacaggtacagctgggaccaggagccccactgatggccccccggggaccccagcaccagccttctctggggtgtgggtcaccttttctgaggaatgctcagtttacatgggtttttactcttcctcaagcaattatgctcacctattcaagaagtcaaatgtacaaccttggcaatgcccacctattcagccttgctttctacccagacagagttccctgacatacccggatcttccgattctcccaaccctcggtatctgatttgaaggtagcactgaagcatgaaaaatcagccaagtcccactctttcactgcttcagaagagcttttctactcatgccatctctggtctttatgactttgagtcattgatgcaggcccatctctctttgctagaatcacattcttacagcatagtgaaactctgcaggatggttccattacaaagacagtgcacgatggcattcaacagttgtcttattcctgctgcttgcacaggagcctctgaactttatagcattgttaattccaggtagtccataaagagaggaacctgtaatgaaaagctttaacatgtagctgggcttattaaaaccaagtagtagcagtaaaatgccgagacatcgcagtcagctgttgcaggtagaggggcttgtgcttttcattatgttgaaatgcatttgcttccatgtgacatactcttcctgctttgtaagaaggtatttgggtatttttcccctccttccttctacactttacttagcggctcttgtcgcctttgaaattactggttcatttctctctttctttctgttcctctgaattctctgctgcctacctctccaggaatacatcaggcgacagttagaggaggagcagagacagttagagatcttgcagcagcagctactgcatgaacaagctctacttctggtaatgagaaagccaagaaccagctgacctgctctgtgttcatcttgcaagtgtttgtgtgtgtgtgtgtgtgtgtgtgtgtgtgtgtgtgcgcgcgtgcgtgtgtccttctaacataccagtccagaagaggggatcttctaagcctcagggacctcaaaaacctcatagaaacttaatacattttctgattgattttgctgagtcctaatatatttaatacagttgttatgcattctttattaactccatttatttgtacaacttgaatataaatccagccttattataagtacaaactgcttttgagacctactgtgtttattgcagagtaatttttaaggccatttgcgacatgctggaatacaatcacagcaaaatgcacctctcccataagaacccatcagctctacagtcatatttcatttacagactattagctttacccttacgatgggaacattttgtgtcccttgctcatgcagcttccacttgaagtacagtacttttttattattatagcactgctctccagatgggctttttggtgtattttttaaaactgaactttttatttaatggcattctgatgttttttagcctgtacataagcttgctaatggcctttgtaggtccaagttttattaaatgaaagatgatttaggcactatctttggctgcttagtttgtacttaattgtacatgtttgagtggtttaattactagatcaggaagtgggtgactttttctaggagttgtatgccgaccatttaaatgtcctcattattgccattttgtcacttgtaattcatcagggacaagtcattttgtaattgatggggttcggtagggattgccattttaaagcaatagcgttttcattaaatgacacattcttgtgtagatactaacacaaggcagtagcttatttctgtggcacatcctgacatccttctgtcattctgttggtattaagatcctttgttatttagcattattttgcctccattgcatgcttatctggtactggccgatgatttctatgtgataatttggccttttctttgctcctctttcctgatctggacaggaatataagcgcaaacaattggaagaacagagacaagcagaaagactgcagaggcagctaaagcaagaaagagactacttagtttcccttcagcatcagcggcaggagcagaggcctgtggagaagaagccactgtaccattacaaagaaggaatgagtcctagtgagaagccagcatgggccaaggaggtaagtaagcaagggtagcctcaccctgttggccaggcttttgactctaatgagtttgtgtgatagaagtggagagttaacccagtgctgcaaagttggaaaacaattcatcataagacacatgctttgcttttgcaagaactataacattatttctgtagagaaatggcaagataccttccttcatttgtgaggttttgtttttgttttttttttttttttgtatatctttgtggttgcaatggacttttataggaaataacagaagatagaaaaaaccttttttctgttactcatccaattgaatttgtggcatggaggatttttagtgacctttttgttgaataatgtgattaaggatttatagaattctaggaagaatcagttcctgtccatgcctggaccctgttgctgatcattaacattgtcactaacataactttgttcactgtgatactaccagcagatgcacagttgacctcagacttgtggtggtggtattcacttttaagatcagaggtcattagtgtttcttctacacatacttccttcatttgcttaactactagactaagaaaggattttcaggaacttagcactatgttgagctattttaataaaaactgcttggatgggagggaaaaaagggtgatagccagacaggtaaagcaaacaaacaaaataaccccaaccaaatcagcaacctttccagggagtcactgtgtgaggtcatgtgcataacacgctggttttcagttcaatcattatttctggcatctagtgatttcctttattttatggtgatcatagctggtcatttaaaaggatgttttggagttattttgtatttttatctagaatctttagatattgatagctcacgcttttttcaagttatctagaatgcaatattactagaaccagatttcttacataagatcctatttttatgaaaataattctttgtatttgtctaacctatctgacatatgtacagaaaatacttgacataatgttgtcctaatgttaatgatagtggtttatgggagcagaaagtaaaaaaaaaaaaaaaaaaaaaaaaaggatttttaaaaacttttttgtacttttacatattgtttaaatcctttagagtgatcatgtatttttttgtgaaaataacttttttcttttaaaagttaaactaagtgtgtggaaaaattgttttgatttgtgatgaagaattttttatcactttcccttacatctgtaaacatgatccatatttacctatgtctctaacatctgcctctttctcttagatcagtaattcaattttgtgatcctactcccaggtacagcatcgaccccttaataatccacctgttcttccagctaagcaaaatcactatgctgctaaacagcagctgacatgcttcttggctggcaggcatgcaccaccttcctctactgctaaaccatttcctagccatgccaagttgaaatcctcagctaagccagacccacagctcctgaccatggcaggtgttcagaccactgaaaaactagcctctacaaagctaatgtcagtagcacctgcaggaattaatgattccagaccaagactcctgcttgagcatcacccatgggagaaagatggacgagcttgtcctattagacttggtttggaagaacaaatgaagcctcaggaagtcttgaggaccatagtgagatctccaaggcactctcactcccaaggatgtagcccaactcgagagttaggatctaaggtcatttgtgtgtcttctcccaacgtctccaaagtgacaagccccgagttgtccattactgcaattcaggagggccttagagattcatgtagaccttggggcaggaagagcatgaactcatgcatctttacaagtgcttctacttttctaagaaatgctgcatcgctaagcgacctccccttgatgcatgaccacttggctttcagtgttcccagccccaagcatgagtttaggagagggacacctacagatcccattggaaaagatcattatgttgtgcaaaccattccagaatttcttctttcccctagacagctccctcatgcacaaatgtaccagaagagggggaaaagcatgaaacagttttcacctccttcattcagcctctacccagcaccttgtgatttgaacttgtctaccttgacttcactgttttccagttgctatttgtcctcatcactaaatttactggtctgtcctctctattcagaactagttcatagctcccaagctttcaggagacatggcattcctgggggcagatctttgcagatgtcatcaaggcacttttctagacctcttaattccctcatgcttcctggtcaggctcctagcagtaaaagaaacacagcatttgagcatgcaaacaacatgcctgagtcatcaagcactcctgatgtgaggtttcccagtcaccataagtctgggccatctctggtgggtgacatcttccaaggtccctggcttcctggcatctggtgtgcttcctttgggcttcacgcatttccacagatatatgggaacattctttggggatttcatatttagtcctctgctcctgggtgtggttaacataatccagcttccaactaaccgttgtctgttcatgaaacagttcccaagtcttagagtgggtgatcatattttagaagaaagatgaaacatttagttgatagaaggagagtgacagtgctaaatttaggactggagcaatcgatgtacaaataagaacaaataattgtctgccttggtttgagtcatcatttttaacacccacttcttagtaggaataaaaatcagtgcaaggatctttacattcttgatcttttaatgcttctcatcagcagtgtatgaactttttatgtaaagcattatttacagatgtcttttctcatattaggaaggcaggggctcaaagtgaccaagtagtaatacacgtttcaaaactttaaatatgaacatagcttatcagtatcttaactatcaagttataagaaaacctgggttaaaccctctggaagtaaaataaaaggatgccattttctttttttcaaatgcaccctctgtgcccatgccaccgtctcctgttgtgtagggtctggactattttgccccatgtgccactgaaggtatcacctagctctcttccacctactgcaacctcttctgtaatctgttccagcatttgttttgtaactcagctctatgccgtctcatcaagtttttttttcttcttctttgcttacttttccatctacttctcctcttcctcattccaaatcgatagtcctttatcagcaatgtaatgctcttatactgctttgttctctctgttcttgtttcttcattttgtaaaacacaagtgatcactgcatttctgagtacctttctgattaatatgttggatattgtagagcaagtgaaaatgctcagtcatttgcaaatcttgttgagctcttctctccctccttttactgagtattctttctgtcctggatgtcacattggccttgatttaaaagaatatgaatgtctctgcattaaaaagacagcttggagccaggcacggtggctcacgtctataatcccagcactttgggaggcaaaagcaggaggatctctggaacccaggagtagttagagaccagcctgggcaacacagtgaaaccgtgtctctacagataataataaaaattagctgggcatggtggtgcatgcctatggtcccagctacaccaaaggctgagggtgggacttgagcctgggaggttgagactgcagtgagtcatgattgcaccactgcactccagcctgggcaaagagtgagaccctgtttcaaataaatacataaataaatagacaggttgggggcattctcactgctttcaaattatctgccatttctgagttgagatggatgtcaggtatgtactgtgaaaatatcagtatgatgttctgttgaacatcggcagaatttgaaggtcttcttcctcactttttggatgatggagattcctttttctttcttctgctccttaaatggcatgtgattttctgggcctggcaataactgtgtgggctccccttccttttccatcccacatacttaaaaaaaaaattgtaccaaagctcagcagtgaaagaatgctttgtttacatgagtattgcatgagattgtattttaatttttttagcactccatcgtgttctctttctgtgatatatgccagtcctggagtgtttgtttgcaaacatcaatctgataagggccaaaatatctctttatttccattagttcactggactttgaaatcactgtgtataaaaactccttctccatccggatttctctgctctatacctaagtgatttctttttccttttatattagttagtttatatataaagttcccaaactagcatttagagagtttatatctttcctccatttctgcatatctctcttatgattaaatataggagagacctggaaggaaatagtaaggagtatgtttgagttcaagttcttccacttcctgcctgcctgacctagggcgtgtctcctgccttcctgagatgcagcttcctcatccgcacatctgcctcacaattgggaagctcatgggcaataatgaatatgcacgtgccatttaaagttacatactacacaaattcaaatgaaatatggtattcaacatattcctattttgtttccaagactgttgtagctcatgaggaacaagtgttctgtctcttgttttggtctggatttcatatgaccaattcactggcgtcgcctatctcttcacccacctctcccaggtgatagataagcacttctttatttcctatatcaactttctaagattttgcttcattacttttaagtatgtgctccattcacacagggatctatacgtttttctggaatattagtaagaagttgatctgggaaaatagtccaggcccttagagtcagacaagattgcatcttaagcattccttatgaatgagagtctcccccgttctcagaggtgacccggagcaggggcatcctcaaacttgctcagtaaccatctgcccatgtggttttgcccaacgatattactcagctctttatgtgactagtgagtacagggtcaaagtatctaaggagcacttaaaagttacttactggcttctttctctttctccagcattgccaataaacacaaaaaccaaactgttttgtccagttggggaaaaaaagagaatacccatatgattgtgttgaattcaccatgtattaattcttaagtaaagccttctgagaccttcctaaaccccgtggactctacatattataaaatattattagaatgcacccatatgacatagtaaatatatatttgctgtcaacagttttaaaattacttctataaatgttttgaaattctcagtagatgttattcattattgtaaagtgagacactgtaacctacaaattgttttaaaatataaaaaacaatttgacaattgacattgatacagtgtttctctttattatgttttaactttttaaaaaatttattttgaaattgttttggaaatcctgaaattaacaaatttatttttaagttgtctatatttgtatagcctttatatatagcagaggccatagacattactcctatcctaggcagtggataacacagacctgtctagagcagaattttatttctgagaccacagttattttttttctctctatataatgctatagtaaatagtatagcatttttgcagaggtgatccaaacttctccaaagttattttagttttcatgttgaaacgattttttaataagaaaaaaatacttttatagtgaagttgatcagtctgtgctaaccttctctgtatttctgataattccttctactgtgaaatcatttataacaggtatcttttgttgttatggtctagcaccttcacactccatacctgatggtactggaacactttctaattggtgctcctggcattttatgtcttcttggaagcaggcagttggagcagaaacttggctcctagacttttttgaacatcctcaggcattgaaacatatcttgttgttcccagtttttaatcacatgtatctttcttctagatgggagaggttttggagggagactttctttttttgtctcacatatttatctcctgttcagtcagcagacataagttgtgataaaccagggaacaggcctttgtctagtatgaaaataatgaaaagggcctgcctagataccccatccagctttctctctgtccatctgaaggtattattaggagaagtgccacttccaatgtttgatttgatcctttgctccagttcttaaggtgattctgcagtgtaaagacacttgggcggcattatcttcctaaagacttcaggactaggttttcttgagacaaagtacgtaatgagatgcctcatcgttacacccttttcttagattttcaattttctttggacaaacttcaacccaggaaatttcagtacactggagccttcctgaaataattttcaaagtgtaacaattacttatgccatatatttttagaatggtaccgactgaaatatactaatgatagaatttaatatgtaaactgttagaaagcataagaaatttttactagaagtacattagcaacatctatacatgactaatcaaatccattcattgcctgtgaaaaccagtaccctagtttctgccctgttcatttctttttttttttttttttttttttttttttttttttttgagacggagtctcgctctgtcgcccaggctggagtgcagtggcgcgatctcggctcactgcaagctccgcctcccgggttcacgccattctcctgcctcagcctcccgagtagctgggactaccggcgcccgctaccacgcccggctaattttttgtatttttagtagagacggggtttcaccgtgttagccaggatggtctcgatctcctgacctcgtgatccgcccgcctcggcctcccaatgccctgttaatttctaatgatagctttagggccccctgtggcctgtgatcctattagcagcagggatgcttagactggggccttgttgctgacacttcccaaaagaattctttctttatctcaaaaatggtttctttgcccaagatagagtctttgggggcaaacttttctactattgtttttaatgtgctgtcccttaatgtacatttaaagctatcagtgtattttagagccaaaaataataattacaagtattcctcactctgcatatattttgttcctgaattttgggtgacaagtggtttggatagtgggaattcagacactgaaggatgcttatgtatgacttatctattaatgatctaccctgaaaataagaaaatggataatatttgaccaattccagtggtctagaaatattaaccttctttcaaagagtctggcatttggaaaagtgatatattgcatgccttgatctcagtttatctattgctgtctttgtgggactttttcttctttgtggtcttatctcaaagctggctttgttcttttgctcaatgcaatagccaaataattattgctgatgtaatacttcgcacacatgcacacacaaagtacacatgttctggtttatattcctggctttttgcagcaaatctcatttggtgtgtggtaagcttctgggacacgggatttcaaaaccaaagccaattgtatgtaccctgcacagccatggtgggggaagagatgttcaaattactcctcactagaggcaggagggctgtttttcattctgtagcttatcttattgtgttaaaatatgtgaggttagtatgagtttaaaaacagacttactttgtatatttgattgagtctgcctctagaaagattcaaaatgggatagggaggatgggggaaaatagctctttcaagtttttatttcaaatcaggcagtaaaatgaataaagacttttagctgctacataaaaaatatgcaaacagacatgaatattgaacatctgcacgtgggttcttaaaatgctcagtgagtcagcagaagagaattaagggctcactgtaaaggccatcagtgtggggagaatggttgcattgtcctggtggctttgggaagcacaacagtcaagttggtcctgaagaaataaaggacaggacacagtagatctggaagaaaagtcataggcttcttgaagttgtctaagatcttaagccatatcttagagtgcgcaccttgtttatctaagtttctctttaaaattgccctccgaggcagtctttctgctgtaaatatgtactaaaggtaatgatgacctgtttagaaagggcattcactggctcagcatttcccgtgaagcccttgggatctgttatctgctttgggctgaaagagaccctggaagaaagggaatgacaaggaaatgaaacagcctgagagaagacagggttagaggggaagagaaaggaggagaagcaagaatgaacaccacatgtgtagaaacagggaggaagaaaggggagagcaagacagtggagtccaagctggacatgaaagaatgagatggggcagtgtatttgaggaagcaggaaagacaactggaaagaaagacccctaaagagagaaaaagaaagtgatacaggaagcctatttgaaacacgccacgcgcattaagcaggcagcctggaacacccacttgtctatcagtaggacacgtgaagaaatgcagggtgcatgcactcagcttcatcctcttgttcttcctctcatgttccatgagtcaacccaaagcaattttctatgttccccaagccatctaaatgcatgctaccattccctttgattgtctagagtgcaaactgtcttcctcactgaccccatggcattgcgaccaatcagtaagataatatcacaatcaatacaagataaactcttagcaggtcacgaattccctgctaaccgaataacactagataatgggtaatggaagagtgatggcttgggtgttctattttgttgttgctgttgctagtgtttgctctttgcaaactcttgatgcagcacagagttttgtcttcttaaaatcagttgatcagaggattcaaatggctgtgcaggtgactacagaaaatccttgctagaaggtgatctacttctatacattgaggctgtcttttttttttttttttttttgggttgtaggtagaagaacggtcaaggctcaaccggcaaagttcccctgccatgcctcacaaggttgccaacaggatatctgaccccaacctgcccccaaggtcggagtccttcagcattagtggagttcagcctgctcgaacaccccccatgctcagaccagtcgatccccaggtacagtctgcctccattccatcaggcattccaataagttgcacaagaaaacctattattaaaagcctagggaattgtaacatggattcaggcacaggatcaaattatgacccttaatatagaatttatagtaaaataggtggccccactgatttttaagagtagaagaacaggtgagaaagaaaaaagcatcacccttaaacttgagtcaaccacaaactcacttctatttaaattggcctctctggggacccataggagttcctgcaaggtgagaacaagcattcttttagttgcaattgccaaaactagaattcatagaaactttgaggtgtgtgtatgtgtgtgcattatatattttttgttttcttgggactttggcatgagcctgaaactgaaaaaattaaatagacttggttaagtaaaattacgtcttctaagccagtggttctcaaagtgtaaatcactggaccagcagcatcaaccatcacccaggaacttgatagaaatgcagattattgggcccacttcagaccaactgatcagcaactctgggggtgggggaggcctggcagtctgtgatttaacaagacctctaagtgattctaatgtactttagagtttgagaacaactattaaaagctatagggtaaagaaaaaagattactccacttttaggaaaggagggggtttctggaagttctgcaggacttttaagttatatatgccaaaaatgaaatatgaagtgaaatagattaaggaattccatgaaaaataatgtagtttcttctgccaaatgtcttaaatttcttccaggcatccacctgtgttaagacttccacgaaatattttaaggtcacctttgaaatatgtaatgctgtttgaactggagtttaaaagagtagtgataaaatcaagtattctttgtgttttcagtttgcctttagtaaataaagtccaagatttttcagcaccaggcagcttggcatatcttcctcttggctgtttttaatttgtatataattctttcatgcctaaccctcaaaaagatacatttttttacaggaatttctattttaatgtacaaatatcctcttttaaaacccctaacgttgaccttggaaggtactttggcctttaaaaggggagaagagagggaaaatgtacttgatgagaacaaccagagtgaaaatgtagatattttgtgacagttaattcacttaagctttcttcaggtgcttcagtttgggggttgtgtggtgtggttttttttatttttttattttttggctcttttaaagtgggtttgtgttttatactagatatttttttaaatgggctttgttttaatattattatttatttaatgatatttaacattaatataaatccagtaggttctattctggttgaagcttaacattcagctaaactgggctttgaagatttcctctgaactgtcattaataacattccagcacttaaatttaaaaccaaagaggatttgacaggtccttgcacaaaacagatattaaactaatgtttgttgaattaacagtgtaatttagaaggcactgtagattttttccccaaccaggatttatgggacaccttccccatgccaggcacagagctagcctaggggatatgacgatgagcatgacagacatagtgcctctctctagggagctcaccttcgtgaagtaataggagacacgcttagataagcactaactatgaggtgtgagcagtgctatggcaaagtggtgccctgcactctggattttaatgatttgtctttaagagccacaacttcgctgaaagactgcctgtcttccctgcgtgaacagtatcaccacatgcccagttggcctagttgagatacttaactcaaaaagttacatcctggtgtcaagagataatacgacagcatagatggtaagagccagcacaggagaaagtagaatatcatagaggttaggtttatgagctatgggtgtagaatgcctggtccagtccatgctccagcaggtgttatctgtgcaatctagggtattgctaaacctctctacaccttacattgctccggtgtaaaatgagggaaatgactgtatccacctcaggatggactcagtgagttcataacaagtaagatatttagagcagtttttgttttacagagcaacaccctctaatgtaaaagttaggggttttaaaggaggaatttcataatattagcagagaagtgcttataaaatacattgcattgctggtcaataaatattcactaaatatacagtagttattgttattatttcacacattccactgacttagcgttcccaagtaaatcatttaactttgtgccaaccctacatatcgttccaatggaaaattttgaagagctgttaaaaaacatgctatatatagttgtgatagactctctatagtccaatttttgtgcccttgaacttttttttttttttccttcagctcactgaggtactggctgatctcttttttcttctaatagtgctgttttcatgttgttttgatgcttagatcccacatctggtagctgtaaaatcccagggacctgccttgaccgcctcccagtcagtgcacgagcagcccacaaagggcctctctgggtttcaggaggctctgaacgtgacctcccaccgcgtggagatgccacgccagaactcagatcccacctcggaaaatcctcctctccccactcgcattgaaaagtttgaccgaagctcttggttacgacaggaagaagacattccaccaaaggtaatatttactggggtgttttttttaatcaccagcatcactgatgatttttattaccactattccagacctttcgtagtagtggagaatgtgatcatgccaaagcacttccccttctcatgtttgttttggtccctcttcattccctggctaagacttggattgccatttaccatgtctgacctttatttcccccgcaagaaaactgaagtcaggtagattgaagcacagatcctacgtccaaagttagaactctcaacaccaagtattccaaactgtcattttgctatccatattaacaaataaagtaatggatatttcattgatgactgaatctacatcaagacaattgaaaacttccagataaaaagtagaaaatccatgtattcctatttttaacaacacaaaagtgaagccagatttcaggggttcagaagatagtattgttcttaggatattttagttggccccattttaaggaaagctctttctaggccaagtcataatttatttccatctttaattaactactgaggaaaaaccttagggtaaaatgaccagccattccactggacagaacagccctgagtttgggttcttttgttttcctataccaagtcattactcattccaagaaatgttctagaatgtggctgtgtgcatctagctacaaacaacctggaagtatttcaaaatactagagacattttttgcatcggattcttcctggctcaggaatcccccttttcctgagattagcatagaggctgtgacaaatggaatgttccacaatttgcagaaaatgccactgttaattccagaagaaaaagaagcttttactcaattacaaatacatttcctcatcttcctcttaaaaggatattataacaagagtcccattattttgaaaataaaaaaagctgataattttttgagattctttgtggaagcagaaatgccatcagaaaaaaaagggtacatagggagcaaaagtcaatatgaaaaataaagtgggcaaaggagcagacacaatagatggaaaagctgaaaactgaatttattggtccactctctaaaaatacgcaggcatacatgcatgaacctgggagaaaattttagatgaattcaaaaacttaggttttaagaattcgttaggctcttctgtctctacaactatgtacatttatggtaaggaaaagaaaaaatagtaataattaatttgaacaggtagtagcattgatttggtcattctgctttactttactgactcatctttatgttaaaatgaataataaaaattaaattttcaaaacaaaggatgacactttacactgaaagtaattttctatactaggattcataatatgattcttttaaataacggactcctttggtacacttaaaatatttaatttcattttaaaatgtctgttttataaattgggacatacttcaattctaccttaggtttctgccagataagctaataatacattttcctcaagtcttattggtacttacacagcctttttgaagatccttccagtattttcagtattaattctgctttgtattatgttctattatgttcactaattgaccaagacacagtgcttttggtttttggttttagtaggtaattgcaaatcaattagaaagtagaaacattcaagatctactgtggtaggttctctgagctcaccaacatatgacttatgtcttaagctctatcctgatattctagtttctcaccagatttcatgatttccttatctgtttattgtgatgtaagctaaaagtggaacttgcttcatctgggtggctctcagctgatgcaacttccaatgagttaatgataccctaaagaaattcctggtatttaccacttttgcccaaccaagagaggtcaattatttttagctcagtgtatcaaaattattagctttacctatctttaaatttgtttttaagattgaggatgaccctctttaatggttcccaaatttgctcattgttttttgccagtagacctttgtttgattttgtttagggagtttaatatttcttcgaggaatgaatgaaagatagttctttactgtttcggatagtttctgtggcttctggcaaatcattggaaaggaggattttctgacaacaggctatggaagctactttatggaaaatatttctgaattctggtttcttccaggtgcctcaaagaacaacttctatatccccagcattagccagaaagaattctcctgggaatggtagtgctctgggacccagactaggatctcaacccatcagagcaaggtaagaaaggaaggtggttatggtaaaagaagaaactcctacccaccattgtcattattgctttcctagaaatgcctgtgttcttttttctcttcagaggcaggttgactttccatgtgcactataaacgttgatggtccagaacacatgccttttatttcttcagtagcttttcagagaaatcagtattcagtggggggctcatgaataaattaattaatggggcaacccagaaaccaatcagatgtaccttagcggacagtttttaaaatctgagagtaaaatttgcaaatatggatctggttgcaatgccctaaagcattacttcagagatcagtttagagtcagcagaacaaaatgacctgttatggcccatttcgaggtgatttttagcatcaggtcaagaaacatgccctgggaaccattgagacattacaaagcaattaccatggaaatagtgaccatcttcagagcttctctagcttggcagttatagaagaactagctcttacgaggaagttgcctctttggcattacaaaggtcactgaaatacagttatgcttccactcttgctctgtgtcctccttccagaatttcctatcaataatgtacattcctacagtcagaaagttgcatccacttccactggttggtgtagaggtctcaagaagctggaaagtaaacagtatctttagtgtctgagcaaattttttgtggtaacagatgctgtttgctgttatagttcatcaagcttccctcagatttttcatgatgaatacatcactttttaggatcaactgaaatagcaaatggcctctgctaaggctataaaaaggatgtgattgggcaggctgttttcttcttcattgtgttcataataaaaggaccctcctttgctagtaagagagaatgactggaaatgaagcttatgattacatgcacatatctttaaaatatggaatgctttaaatcataaagttttaattttcctcttcacatgaaaagccttagggaaggggtcagcccagcaataacatgaaactatactaagaacatgaattcctttagggcaaagatgctagcccattctgtgtggaattaccaattgcaagaggctctgaatgagccattttttttccagtgacttgtctgattcacactgagctggtattgctaagcagctaagcagcactgaggaagactagagccactgtgaccaggcagccaagggaacgttagtgctggatcgccagcctgaactttatcagtgcccctcttcaagcagtgataaatccccaattatcagtgctcctgcttcctttgaaccctgcccccgggggctctgttcattggatcggttgcttagaattttagtttctttagatcaagtattatttcaactttaagtatttttccttctgtcaaccaaaaagagaattaccatcatatagtcaaataaaaagccatttccattccctctgaagtgctattttagtgacattaaggcctaagataattggtatttgatggtcagtggtttacaaaataatgagccttttctcttggaaccacttggatattatactttatccaaagaatgctgactttgtgagagacagctaacatttttctatttagagaggaagggaggaagtgagttaagaggtcatagttccttcctataatgaaagacagagattgggggtggggggtgaagaagcctcttctctgcatgtaggacagtcctacagaacacccctttttatgctatcatgtatctccatgtggccagcatttaaggtgtaaatcagatttgcggttctagattggattgcatttttaaaagcttcaagatttgttttatttacagtgagagccacagctttagttcacctttgctgcacaatataatcaccataagtttagtgacctaaaagaataacagtttaatatttctcatgatgctgtgggttggctaaggagttcagctgctctcgcctgggctcactcgtgcagttgcactgagcagatggttctgctgtacctcttgctccacgtggtcttccattctgggcttctttaccctttggtgatctcagaagagcatctcaagagagaaagctccaatgcactagtacttttgaagcctttgcttgcatcatctttgctgataacccattagccatcacaagtcacttggctaagccctgagtcagtatgggaaggaactacacaggggcatggacactgggagatgtgatttgccaggggccattactgtgacacagacctctcctactctctgttggtcctaatgaagtccgtatagttctttttgtgccatttatcagacaaccatccatccataaagccactttaaaaggtgttgcttttaaataacctgtcctttacagtgcttccaagctttcctgtacttggtcaatattctgtttttcctcctagtcttttctttgaagtgattcccaagggtgactagaaaattagcaaagttaaaatggatgcagtaaaaagtacacagctaataagggacagattcaggatgttttgttactatcagtttttaattcatttgctaagttcagcaaatatatactgaagctgcatgtggccctgggacccagtgactcaaaccaaaaccgcctgactccagggcgcaggggtcgtaatatacctgctgctctctgggactacgggtactagtaggggcaaaattatatttcttgcctcactttcttattttgctttgaattaactaaaagaggcagaacctctctcttcttctgtggcaaacttagggaccacaattttaagacaacagtgtctcaacccagaaggaacctggacccccaagtcaccacttagagaaccatcaaggagaccagttctacctctgtatattatgatgtgagtgagaaataaaccactgttgtgctaaatcaattttttaaaaaaagaggccgggcgcggtggctcacacctgtaatcccagcactttgggaggccgagacaggtggatcacgaggtcaggagatcgagaccatcctggctaacacggtgaaaccccgtctctactaaaaatacaaaaattagtcgagcatggtggcaggcgcctgtagtcccagctacttgggaggctgaggcaggagaatggcgcgaatccgggaagcggagcttgcagtgagccgagatcacacccctgcactccagcctgggcaacagagcaagactccatctcaaaaaaaaaaaaaaagaaagaaaaaagaaaaacaaggcagagcctaacggttaagcaaaaacggtcagtttttgcttcctgcacttagtagtaatgaactccagttactaagtgcaagatgttttctagtaactgcagaatgtttgatgttttttgatcatttgggacacatatgtttaaatcagtaaactatttagtaccctgaagagaagactcttgaattaaaatgatcagtatgcaacggtatacctgtaacttgaggacaaaagtaaagcttttactattttgaatatccttccttctcccccaaataactccctattatgtcactcttccactgtctgtatgcaccataccaaatccaaaagagccctatggagaacactttttttatatactttaagttttagggtacatgtgcacaacgtgcaggtttgttacatatgtatacatgtgccatgttggtgtgctgcacccattaactcatcatttacattagctatatctcctaatgctatccctcctccctccccccaaccccacaacaggccccggtatgtgatgttccccttactgtgtccatgtgttctcattgttcaattcccacctatgagtgagaacatgcagtgtttgtttttttttgtccttgcgatagtttgctgagaatgatggtttccagcttcatacatgtccctacaaaggacatgaacttatcattttttatggctgcatagtattccatggtgtatatgtgccacattttcttaatccagtctatcattgttggacatttgggttggttccaagtctttgtcattgtgaatagtgcctcaataaacatacgtgtgcatgtgtgctgctttatagcagcatgatttataatcctttgggtatatacccagtaatgggatggctgggtcaaatggtatttctagttctagatccctgaggaatcgccacactgtcttccacaatggttgaactagtttacagtcccaccaacagtgtaaaagtgttcctatttctccacatcctctccaggacgtgttgtttcctgactttttaatgatcgccattcactggtgtgagatggtatctcattgtggttttgatttgcatttctctgatggccagtgatgatgatgcattttttcatgtgtcttttggctgcataaatatcttcttttgagaagtgtctgttcatatcctttgcccacttgttgatggggttgtttttttcttataaatttgtttgagttctttgtagattctggatattagccctttgtcagataagtagattgcaaaaattttctcccattctgttcactctggttggctgttcactctgatggtagtttcttttgctgtgcagaagctctttagtttaattagatcccatttgtcaattttggcttttgttgccattgctttgggtgttttagacatgaagtccttgtccatgcctatgtcctgaatggtattgcctaggttttattctagggtttttatggttttaggtctaacatttaagtctttaatccatcttgaattaatttttgtataaggtgtaaggaagggatccagtttcagctttctacatatggctagccagttttcccagcaccatttattaaatagggaatcctttccccattgcttgtttttgtcaggtttatcaaagatcagatagttatagatatgtggcatcatttctgagggctctgttctgttccattggtctatatctctgttttggtaccagtaccatgctgttttggttactgtagccttgtagtatagtttgaagtcaggtagcatgatgcctccagctttgttcttttggcttaggattgacttggcaatgtgagctcttttttggttccatatgaactttaaagtagttttttccaattctgtgaagaaagtcattggtagcttgatggggatggcattgaatctataaattaccttgggcagtatggccattttcacgatattgattcttcctatccatgagcatgaaatgctcttccatttctttgtatcctcttttatttcgttgagcagtggtttgtagttctccttgaagaggtccttcacgtcccttgtaagttggattcctaggtattttattctctttgaagcaattgtgaatgggagttcactcatgatttgtctctctgtctgttattggtgtataagaatgtttgtgatttttgcacattgattttgtatcctgagactttgctgaagttgcttatcagcttaaggagatttggggctgagacgatggggctttctagatatacaatcatgtcatctgcaaacagggacaatttgacttcctcttatcctaatttttttttgagacggagtcttgctctgtcacccaggctggagtgcagtggcgcgatcgtggctcactgcaacctccacctcccaggttcaggcgattctcctgcatcagcctcccaagtagctgggactacaggggcccaccaccaagcccagctaattttttgtatttttagtagagacggggtttcaccctgttagccaggatgatctcgatctcctgacctcgtgatccacctgtctcggcctcccaaagtgctgggattacaggtgtgagccaccgcgcccggccagagaacatatttttaactatatacattattgagcaggtacagctatgcaggcatcagttggtcaaaaaagtgttattgggcaatgcctgcagttccttgccttttgcctgattcagggcaatttattatttatttctgtatttaatgaacatctctggagcacacatacacatatgtctcatatatatgtatttactaatttaagcagtgtaacaactctgtgaggtgttgactgtaatcaccaccattttacagaaggagaaattgaaattaacatgtgtccaaggtgacaaaagtagtaagtggtagagccaagatttgagctctgataaccttgcaccaaagtctacattcttaagcaccattctgtgctaatttgtttagcatgggtgcagcttgctttgctgcctcattttttcccaaggcaaaagagcccttgatttcttgactgacacagcaccattttgtccccacctttctcaccatgtgcttcagtgagtctgttaacagctcctcttgatcctattgttatttacccttatgttgcgatatttactaccttttcgaagttgttgtctcatgagacccatttatattgcaaacacttcccttctggagctagaactagtgtcatcacatgctttttatagttcccttcctagatggctaaagtctgggagatagcacagtcatcctgaccccatgcaactgttccttgtccttccttctcatgcatatgtagctgggaattgctcagactgcaatatcaataggcaattctcacctgctatgtaaactcctaaatgcctcatgctgtgaaggtgatcagttaagttcaaatcaaaatttgattggaccattttaaaatactgtttttaaaaatcaggtactttcatacttaacattgatgtatgtattctttctaaagcaaattaaaatttgatcaaacaattacattctgaataagattcaaattaagtcagaaatacccagtcaaacccaatgactaaatgattaatttcaaaaaataattctctgtcccatcccaaacctattttcttatgactcatttcttctcattggctgtgtcatcaaagaacaaagtaaagtgaaatttggcagttggccagttaattaaagacttggcccaagtatttgggccacaaaattactttgtaatcccaattttctgttttgactttttatgattcaaatgaatggaataattgccacattttcactttactgtgagttttatagacctagcagcattatctgcaggatggcaaatgtctgaactaaaagttagcatttaaagaaatccatttggatgttttcaggtttttacacattcggatctgaataggctcagttaagatgtgaacaagggatatctattatttcatgggattcttctgaaattgatcctcttaagagcattcatctcagaccccacagccccaaggccagatcatttaatacataatgaaggagagaaaaatgtgaacagcatgacattttctcaaactactcatgttttaccaaaagaaaaggtagaaaaggcattgtaaagttttccctatttctatgtgtggtaacatagagactaaatacttctttcagtctccagcagcaaaaatagcaacctattaagatcagcacccacactggttagctctggtgaggagaacttgtactaatgaggccctggtcagggatttaatgcccatgggatccaattagcttcacacaggatgagactctgagcccagtcaggatgtaggctcatcccagctgcttctgctaatgcccatgctctttttcacacaggacatcactgcccaggcctcatcatctgacttggcagcagcctcctaactagtctgcctgcctctctcctggtcagtcgttcacgtgtactgtgggaggtacacattctcctctaggctttaaaggccatggttatacaactcacccttttcttctgatcactccactctcccagtgtttcctaatacagatttggtacttgatttggccagtgtcatctctgcacccacatgcatcaggaaaaacaacccagccctatgtctgctccgactgttccccagccttcctgctacaacacccagtcaagttcttgctccttcataacactgccatcaaccataccagtctgcactaatggttccccaaactccaacaatacttagtctctttcatacacaacatacagttttgccatgctccctattgtcccctctgcataagtctcatctccatgattgtgttgtaacttgactgtatgccctgtggcttgtgcttctcctccatccctaatcctggtccggtaagtttcacaaagttggtgcttaacacaaaggttttggctaaataatcaaaggagtgctacattagaacaagtagctctatcctgctaccacaccacaaccaccagggaagaaaactcagagcatttatcaccagctaccctcctctcaagagattttttatttatttttttgtaatacaaagaatactacattaccgttccacaaaatgagagcaactccaagaaaccttaacatgctcatcattcttaaatctgtaatacagttggtgagcagtacattttttagagcaagtttttttggaattatttaattatgcataataatttttgaccactattgtttaataaaacagggcagtgtggaagaattcgctatttgggaattaaaagagattatttattttaaaaaatgaaaaatttgaaatgtagattatttcagagctattacacatttatcattttagacattttctaaatgaagggtatttccagtatggatccaaatctattttagtcaatttgatatgaacaattgtcataaaaatagttacttcacaaaggaatgccattattggaagtttttcttaagtttaccaatgatcactctgcaactgattttactgttaagttgacttagcaacccttttaccacaaaagtttcaaagataatatgattagggtctacatttatatgatcatattaatgaatcatgagaacatatttatttgtacatacgtttttcactgcatttttccacagtcatggtctatttctactcaatcaaatgtttttgacagatacattaccacaaagcaagattcttgagttttcagaaagaaattagttggtttaattgctgcttataaagttgccattgtgactgggttactggtagactaaactaaaagtatctcaaaggaaggggtcatatccaaatttatgggagaaacatctaacatccaacacagtacagagtgcctgatacatacttggtactcttaaactgggcagagcaaagttaaagcataaaattacattttaatataatatctcacggcattaaaatcatagctgtatgataactgttaacaaagtctgtttggggaactgaagatgttaggaacagagaggaagctgacatcagatgtttctcttctcagcatctggaaggcgatagatttgagctctgagtttcaggtctccctaaattatccatgcccagcattgtgtaaatctaacagaaaaataaaataaaaaaaagcctatgagttataaatttcaaagaaagagctttatagaagccttgagaatgctgctttttttttttttttttttaacaaaatcgtaaaatcctcagcagctgcctcccagcaccactgcttagatgtctcctgtttgggtacagctcccctgatggccaaaattggcctaggtggtcctgcctcatgcttccatatggctctgtgctcaacgcaggcaaagcatgttgaaatgggctgtgtatatccagctaagctcacagagggcacaggctgtgtcccgttcattatcatatctcaaatgcttgacccagtgcctggtatagaataactgagtgaatgaatactgctttttttggtgggaataaatatatgaagacaaatacagtaatatatatatatatttttaatgggagtagtagcctaccaacaaatttggtcttgaatttgctttttttttttttcgagacagacagagtctcgctctgtctcccaggctagagtgcagtagcgcgatctccgctcactgcaagctctgcctcctggattcacgccattctcctgcctcagcctctcaactagctgagaatacaggcacctgccaccacgcccagctaatttttttgtatttttagtagagatggggtttcactgtgttagccaggatggtctcgatctcctgacctcgtgatctgcctgccttggcctcccaaagtgatgggattacaggcgtgagccaccgtgcctggccgaattagcattttataataattatccaaaaatcgtctacccgtcggtaatagcctaagcatataaagacttcctgcaagaagataataaaaaaaaatacaaagactccacaagctacatgaacaaaggatttaattaagcaattcacagaagagaaattacaaatggcaaacaaatatgaataaaaattcttctacctcagtagtcactttttaaaactgtacctaaataatgagatacaatttagtataaaaccttgtatggagtgaaatggaccatcacatttacttcagtgaaaatctgtcatacctttatacactcatacatatgcacacacacatgcacacaccccaaacttaggccttttcacccaagaattctaatctcaggaaatagaaatgtgattggctatttgtgtacagggagattattgtttcactgttatgtgtcacagcaatgtattggaagcaccttaatatttaacagcagagaaatggtcaagtaactcatctatataatagacaattaatgaagctattacacagcataagaatatgctcacaatgcagttaagggaaaaaagcaagatgcaaaactgaatatacactatgcttccatatataaaaaggaaaaaaaaaactgaatatgcagtatgcttctatagatagatacaaaagaaaaaaaccccagcaactctcattctattgtttctgtgagtttgatgtttgtagattccacgcataagtgagatcatgtacaatagtaaaatatagttgagtatctcctggtgcagagattatgtgtgttccttccttattttttcccttttaatatttttcaagactttttacaatgagcacagaaaaaaatgtttgtaagaaagctttctttgaagattcaccatccagagctagtattttcaatgtgatgaacaagagttcatcctgtacacatccagtagctggtcaggaactctacagaggaaggcatgactgtcatcttctgttgaccccttcctctcaaggtcttgtaagtgctctttttacttccttgcactggggacgggactatgcttgtgtctaccaatggcaagattttgtcccccctagctttactgaggtatgattgacaaataaaaagtatatctatttacagtgtataacatgatgttttgatatatgtatacactgtgaaatgattactaaaatcaagttaatcaatatatccatcacctcacatagttatcatttttttctgatgacatttaagatctactatcttcgcaattttcaagtatacctcgttatgatctgtactcaccatggtgtacagtagatttccaaaagttactcatgctgtccaagtgaaactgtaacctttgaccaacatcttcccattctctctccttcctagatcccctggcaactatcattctactctctgtttctatgagttcggtatttgtagattccacctataagtgagatcatgtagtatttgtctttttgagagagagatatatcacattttctttatccattcattcttcagtggacacacacttaggttgattccatattgtggctactgtgaatagtgctgcactgagcatgggagtacagctacctcttcaatgtactgatttcatttcctttggatatatatccagaagtggaatctctggatcctatgataattctatttttagtcttttgcggaaccttcatactgttttccgtactggctgtactattttacattctcaccaacagggtacaagggttccctcttctctgcatcctcaccaacactcattatcttttgtcttttgaaaacagccattctaataggtatgaggtcatatctcattgtggtttggtggggtttttaaatttatgtttttattttttgagacatggtctcactctgttgcccaggctggagtgcagtggcgtgatcatggctcactgaagccttgacctcctggggtcaagtgaccctcccacctcagcctctcatgtaagtgggaggacaggcacatgccactatgcccagctaatttttttgtggagatgggatctcactatgttgcccaggctggtcttgaactcctggcctcaagtgatcctcccacctgagccttccaaagtgctggggttataggtgacagccactgtgcctggctcattgtggttttaatttgcatttccctgatgattagtgatgctgatcatttttttcatattcctattggctatctgcatgtctccttttaagaaatgtctattcaggtcctttccccatttttaattgggttattcgttttcttgctattgagctgttttgagttccttacatattttgggtattaaaccttatcagatatgtgatctgcaaaactggcaaggtctggagagtgtaaccagtgtgctctgtcactcacacagcaaccctgatctccggagaactgagcccatcttggagagccccttgcagaggaccagcagtggcagttcctccagctccagcacccctagctcccagcccagctcccaaggaggctcccagcctggatcacaagcaggatccagtgaacgcaccagagttcgaggtaaaactttctcttacctttacctggcaatactgcctgggaggaaagctgtggacagggaaaaaggttagttacttcctgactctagtccaggcatggccaccactgtgtgatcctgaagagcctgtcaactgctctcaaccccagtctcctcgggagtgggccactgtccctaattgtgtgtgtgccatcagtatggacaaaatcctttctaatctcagataccagtgttttccagggagatcaccaaatatcagtcttatttgaaaatacagtcacttaccagtcacctgaatttctgtttctgtttgattgccggtttttagagtttcatgtacccacaaatgtcctgaacgcattgcaccaattgtcctgtttagtattctgaacatagttcatatacacagttcagaataccatgtatttctcaaaatgaaattcagtaaagactaatgtagaatacacttgaaggaaggaataaaatctttgacttaaaaagcatatttaggccgagtgtggtggctcacgcctgtaatcccagcacttagggaggccaaggcaggcagatcacctaaggtcgggagttccaagatcagcctgactaacatggagaaaccccatcgctactaaaaatacaaaaaattagcctggcgtggtggtgcatgcctgtaatcccagctactcgggaggctgaggcaggagaatcgcttgaacccaggaggcagaggttgtggtgagccaagatcacgccattgtactccagccttggcaacaagaatgaaactccatcaaaaaaaaaaaaaattgttgactcctctggttattcctattaagtaaaaattagcctctctaaatatttaattcaaattattcatcattgtttagtttccagtaatggggaggcctatgaaaaacattattatttccaggtgctgatacataataatacattgtttctagctagttaaaattcactccttctgaatcaacttcttcagaagataattttgcttctaagtgatgaagaccagtactttaattgcaatttgacaaatattaacatacttataagtttctctgtctgatgaaagcctcatgagaaccttcagttcttttttctttcttagactctttattacataccacctcctaatacccttagtttatctcctaacaccctttcagggttttaaataaatcactctatttccattttaaaaagcttgatatctaacatgtgattgatgttcacgtctctggattgggatatggactagccaacagctgcctctatatgcattcttctgattagtggcacatctcagaagtatctactgtatgtctttgttgccttgatcgaaatataaatttccttaatttagaaaactaccagatgtagtggcttacgcctgtagtcctaggtacccggaaggccgaggtagaagaattgcttaagctcaggagttcaaggctgcagtgagctatgatggccccactgcgctccagcctaggtgacagagccccatctctaaaacacctaaagaaagaaaacagccattctgttatcttttttctatttataggcaacttcatattcttagagcaaatatttaaataaaccaaacttaaacgcataccattttaattctctggtctggttcaggcttactttttatttccttcagcccctcgttcttccggattaaaagggctgttgtatccctggtatgtccctgtccaagaaagactactttttaagaaataaaaaccacctctcctaccctaaattgcatcttctctatctgtaagctcatagactgcaaagatgctattcactctgcagctgtcagggtccccttgaccttgctctgtacctccagcctagggcccttctcctataacaacccccttcttgccctcacctcattcttttatttttaaagggctgagaccactcccatctccaattaaaaaccgttccaccaaataaaataaattttttttccctcacaaaatttcaacaaaataacctatcctgattggacaaatgataaaagaagaaaacaagcatagaaccttagaggctcatttagcatagtgactgagaataggactttcagaaatcagaactccagctctgtctataatttcagtgtgacctccggacagttgtgtcatctttgtaaatctgtgttctgtaaaataggagaatagtgccatatcattgggttggagtgaggattaaatgagataattgacatggaaagcatttagcactatgcctgacacataagaagtgctctagtggtgatagtacttgctacatttcttttttttttaattgttactagtgatttccaggtcacaagcctaaatgtgtttgcctgaacattatatttttcatggatgtttcttgaggatttgcccaggtgaatgacgtgtccactgagtaatctcaatgtgatgacacatcacagataattcattcagaacttgagccagcactttttgatggccatctctttcttggtcctctgtttttttcctctagccaacagtaagtcagaaggatcacctgtgctcccccatgagcctgcgaaggtgaaaccagaagaatccagggacattacccggcccagtcgaccagctgtgagtgcttttctctccaagagttttgaactcttaatttaccagagaacccacaggattaagtagttggggatacactcatgatgcaaacaaaaattgttgagattagtaagaacggatgctagaaacatcccgaagaaagtcatacctgattaggaaagaaccgaagagatcttggattgactcctctgcctttggctatttgctgatcattagcagtcctttaactataaaacaggaagagaaacaactcctatcattccataatttctactcagcaactttggcaaaaagatgttgaaagtagcagttaaagagacttgggtactttctatgaacttctctaatctcttctactctttccccatattattttccacatgaattaatattacagtttttctgctatttttcatgcctccaggactatattttctggaccaaactttttaagcagggtccaacaggcgtcgtaacaacttagcatccagcttcactgctgtaacatgatagacccccaggtagccttaaagaggagtatggaggctaaaatttgaaagttgaaaattaatttgggatgaattactatccattttttctatttaaatctcttgagaatcttttctgtaaaatgaacgtgaagctttttggtttactcttttttaacatcttaaagtaacgacgtataccgagagtaataatgaagggatttgcatcattctggattgacattctcttcgcccttttgtatttatcagttgcgtactaacaattacaattttgtgtctaatctgctgcctttctgctggcttttcctccttctgtggattcttctggattgggttcctctcatttcagagctacaaaaaagctatagatgaggttagtattaccttttcttggtcatgctttcacaaaatgtaaatattaaacttatttcctaatgttgacattcagaaaggtggccaatgggagcaatcagctgggaggagatttgtagcaatctgctgggaggagtgccccttcaaatggaagccaactttaagaccctcaaacctacccatatagcttcagagaccttccttctaagctaaaatgtcacttttccaatgttccagtctggctaatgacaagtattcatgctttattaatggcagtttctccttccagtatcttccaatagcaaacctgtacttgccagccttgctagggaatggctctcagcagttttactaacaagaaaagagacatcattctaggacactccaaatttagagtgtgtgatttgtgaacaaggagttagtaggtattgttagattaattttgtgggacattaacaacagcatcagaagcaacatcagctttagttaatgaatcctggaaagttaagtgactttatttccttgtctgtggagacgttttccattagaaaaatatatggctttgtcagttgtaggtagcttgctaagaaggatgactgccttactgctatttgtcagacctgcatgaatacagcagagtagaatttgtttttttaagatccaggccttgcaaagagtcctaaatgcatggaatctaaagactaccatcatggctttaaagctgtagctctgctgagcactacttttgtgaaatttaatggaaaaagcactggctttgaggtcagcaagctgcattcaaatcttggctcccccagtaaataactggctgagactagtctcataacctcactgggccagagtttcctcatccataaaatgagaataaaaacacctccccatcccacttacaagattgtttaggatcatttaaggtaatgtgtgtgaaagcattttatgtgtaacattgctgcagaaagccaagggtttgattaaggtttgggccagaggcatggagctattttggcaggtaggagaagcatgtttccatgtatctggtcttcaccgaagagcctcactttttcagacttatggccacctcaccacccagagtgacgagacagttatgatcatagttgaaggattgttgcttataaaagaatgagactccgcatgtttgcggtgtgtggatggcatttatagaaagggaagaggagagtgtgtttttaattgctctgtgccgtggccttgcttgcccctctctctcataatagtgagaagggcagggattatcacaacttttgtcagttttctcccagaacaggtaaagaaagacagtgaagttctggtgctacagttgccaataaaatggctgtgcatgtgcagaactcaagaggaattacatgagttcagaaattggcttggaggggccgtcattaaggaaaaggctctcacagatttcatctgattaacccagaatattttaggctttgaaaaattgctctacttttttttggtgtactgcaccacactggacagagatgagagggggcaatggaggtatacgtaattacaaataattgagggggtgtgagctgcatactaaaatctctggagccatgtatggttggaaaagccctccaggtgactatcctgatctcttgagtatcactgatccaaaccactaaaataaagcggttctacctaacccagtggctctcaaccacggctgattcctccactcctcttcccttaggagacatttggcaaaatctggagacagttttggttgtcaccacttcagagtagcaggcagtggtactggcatcttgtggatagagcagaggggtgctgctgccaaacatcccgtggtgcacagagaactccctacaataaagaattatctggcccaaaatgtcaacagggccataattgagaaactttgaactacacctttctcccttctccattcataggttttggtagggcttccctctcaacgactgtttttgcaatttagataactgggattgaaatgaaaaatctgaaaatcacttttgaaatattgtcgcttgttattgctaatgatttaactttttataaaaattaatttgggggagtgtacattaatgtgacattgctttctaatggaatatgagattttgcagcatagtctatttaatatagtctttgaatatagtctttgaaaataaatgggttttctctgttggcacaattaaatatgtgacacaaagattatacacgtaagaaaacactgtttttaccgctgttttttattagtatgtgggcatcaaaaatttcaaagcacatcaatttagattggatggaaggtgaacaataactaggggttcaacccccttttccctcagatgaggatattgaaactaagtggcttgcccaatgtcatatctttagagttcctaaaaagaaaatagtttaatacaaagagaaaaaaaagctaaaaatttttaaacaatagttcaaaaattgaactaatatttatttgaataaactatattgtttctaaaaagggacctaaaagagcgcctttttagtcaagatgtgcataatagttaacctttgttgaatgaaaaattatatctagttgattctaaaaactgttaagcctcgtagctatcttcacatttactctgtagtcaaaaaatcttaccatcttgccatatttcttttttagctatatattctcaaatattttcatgctaaatagcacttattttgttttttaaatactttttagctccaggcttgtgacagccaagtaataaattaccaagaaggctcattatatggagaaaatttgtattgtcaaagaataaaatatatgaaaatagaattgaacccaatggtgttaatattagattgtgtttatttcctataactttgctattataaatttttcaatactggacggataagaaacaaaacttcagctaaacacataggttcttagcaatggaagattaattttctttgactacaggtattactttggaattattcattatttttaccttttcatagggattctggtatatgtctcgcctccaaactgttaattgaaaatttcctttaagtttaattgttatttctaatgtttcagggcagagagctttttagtaacacagaagcaaaaaattctaattaaaagcaaaattattaagcagttcagaactttaaagtgtttctaaatacaatgtttagaaaaatgtatgtcattttaacaagtgaaagtttttttaaatcagtagcctgtggactaaatatttctaaaataattttgattttttagaatttcttttgtctcgttttgaaatgtcagagaaaaggaaaataaacctctggggaaaatgtatcattaattaaaccatagccaagagtattatattttactcagaattattaacaatagagataaactcttttaaaccatattctctctttaaattatataaaatgtaattcttaataacaagtaacattttaaatgctagctgtattctttgatgagacttaacacagtcctaatatatagatgtcagaatacaaaataaatttatctaatttttcattatttcactggtttggaggatgataatatccttttctttcatagccttaacaaatatctagactttattttcccatggtactcaagaatagcatacccttcactttcttcttcatttgataaagataagcattgacaattgccaggaggaaataagaagtaaaagttgaaattcagatattagcttttcctattttggctaattgccaaagaaaccagaaatttgcataacattatacctatgttatggttttcctcttctttttataatatgcattacatttaaacagagttggccttctaaatacaattctattttcactttcacagatggagcaaatacattcaccgagattgaggcatgtgcaaatgtgcaaatgtgcatgtgtgcaaaagccctagccaagtgtgtttctgtatgtaatgcaaaggttgaatttttagcagcttccatattctaagggtttcaaatcaggtgtcatcaagacaaatttaaaagccattttgctttccctttgatttctatgaaattagaaagaaatgacccttcagttaacactatgaattgcctaaatttctagaccacgtaaaacacctaaagtgtttcctttcctagtgtgaaccaaaatagtaatgcctgacatacaggtggcagtagagaaacaatgttttgttgtattctcaaaataaaattataatttaactatacacatttatcacagcttttcttttaaccgattaggatggattacccaatgtcatcacccaggttgctctaatcctacatcaggtgaattggatgcatacatttctggattgaaataaagagagaatatggccatagaaaactgtgggatttagtatttttcaatgagtttctttctccctaatcccctgtctctcactgaatgctctgattcccacatgggtcactaatatagggagaaatggtaagactgatgtcaaattgctttttccccatttgcatgctgtgtgccatgggcagtttaacccatgcaaattagagcggccatgcttttgcagaactgcttccctctgcattactctgaaagcatgtaaaataaaaggtagtcggatattcagcacactgcctgcagtatgcctggtgattaaataccacatcatcacatccataaggctaaaggtttcatcatactcatggaaaactcaaaattatctcttccttttggtatttgcacattcattttagtgttcttcaccaggatttctgccagatgactggaatttaaaacaaaagaaaatgaaacacctatcattttggaagagaactcttgttgttgttgttcctcttgattaattcagttctgtggctgtaaatttcagtggcactagactttaggatgggccatgatttgatgtggtacctccattctccagggaatgatgacacaccaaatgagtcactgtagtagctggaaccttgggagttgctctgttctatggctgactgatggtaaatttcagtacagcagcaatcataagaggggaaaagccatcactgtggcttgggcaggagtcccagaatactggggcacaatttctaatcccacatattttcccattaactctgggggtgaccagcttcacctttccaaaacaaaatgagaacccaatgtttgtatatatgtgtacatacacatatgtacacatatatattcaggactgaacagtctcagtctagctattggttttgaaaaagtttaaattgatttcatctttcttttctagcttctacacgctacaaacatcattttcttagttccatgcagtaactatgtttgtcacagttctatatagagcttttttttttcttgttgcttaagctggagcactgacttgctgagagatgtagctttggtcgtatctaccactcatatgctgaacaaatttttctttcataggatctgacggcattagccaaagaactaagagaactccggattgaagaaacaaaccgcccaatgaagaaggtgactgattactcctcctccagtgaggagtcagaaagtagcgaggaagaggaggaagatggagagagcgagacccatgatgggacagtggctgtcagcgacatacccagactgatgtaagagaactacttttaaagtgtagaccgggaggggactaggtttccaaaataaaaggacaaaaaaatatgagttaaatgtaagattgtatatgggtctgtggcaagataaattgactttcgggacttgggtttttgttggagcatagttctataattatctctatctatggacacaatcacttagaatatgtagcatttttggactgcatacactttacctatccattgccaatggattgactatcctttcggcgactctttcttgttcttttcatcttaagggcaaacaatatcgacaaccagaccattgatacgtgccttcccctctaaaactgaaacactgaaatcatgggcaatgacatttagggattaaaattaacaacataaaacatgtatttcattaccaccactgccaccaacaagcaaggagaaatgcacaagccagcatgcgttaccatcccagcaaaagaatcaggactcagataatcatgcagagaaagttccaaaatataccccgttatgattttctactttattcccttcatggcttctttttctggatccatttttctgtggtctgtgtctttgccacatactgtcagtctctttgcagttctctttttatgtatttacatgtatatttatatgtacctacattttctttagtaattgtagcctttttcttttttttttttttttcaaggtgaggagaaagttcattttttttttttcttattggagtggatcccgtgaaagaacctacccttatcccctgttgcttccccagttcctccacctagtaagcacaaggtgtttgtgccctggtctcctacaactttgatagaatgagatgctaatttttccatcttcacacttcaatcacctctatttctttggctcagctactagcattgattatcagttcacactcactctatataaaaaagaagccatttcaggccacaaattattgtccacttcagcagggactggagaggcagggctggccagtctaaagggaatgtcattcactgattaacatcattacatacaagcgattctaagaggcaaatctaattaacgtagctgaaaaatccatactggttattttgctgttgatgacccagttgctgacagctctaaatatgctaaaatatgacattttgaaacaaattgcattaaattgcctttttaaaagtaaataaaattgttctagaggcaaaatcactaatccagaacatttctgcaaaacatgctggcccttttagtttttgtcttgactcagaattgcttaattcttctgacagatgttttgaactccttttaagcactgagcatgcaagcatcaggatgagagaagattatgaaattaaaaggttgctaaaactctcactatgtgatagccctgctgaaggctttaagagatctgataagttcgtacttggattttgtcttccaaaagtttatatgctagttggagaatgacaaaattacacatggaaaactgcaggctaatataaacatttggaggaacaaccaaagatgttcattagcatttgggttttaggtcccctatcatattttgcaaggctattaatggtgttcaccctcctacctttaaaggcaaatctaggacttactccccactgtagaaacacccacctttctaaaatttcctgaatagaccacgcttcacttctgtctggcatttcctgttcctttagaaatcacctactcacagccccgcctgcataggtagagcctgccccctcttctgtgctaccgctgtatgttgtgtgtattcctgcatcttcatgtagtgccttgaatcaggattgtttgttaggtctttgtctccttttctggactatgatatctttcagggtaagggttatgccttactcatctctcttgctcttaacacgttccatggtgtctggaatacagtgggtcttcagtgactataatttacatttaattgcactgaatttgaaattgcaagttctgactttgaagagtgtatagccaattctatacaaataactgtcagcaagattaaaaaaaaaaaaatcctgaggtaatattagaatcccaagcagggggaagagttgaagtaaagacacagaaagttgactttggtgggaatgtatggtgtatacggtggaggggagtctggactagtgaaatcagaccaagaagtgtgctctttatatgtagccattggaaaccattgaacgtatcttgagttcagtgttatatttgagggagattatttcagcaagacgatttgaaaagggaacagactggagactggtaaagcaattcagaggcgctattactataatctgcataagaaataatgaactgaggctatcatggaatgctgatggtggaggcaagacttgacatggttcttaagggattggtaaactttagatagatggaaatgattgtttaagaacatttaaaatatgtgattatgtatgtgagaaaataagggtacgaagggtacaaatgtatgtgtgtatgtttacttcaatttgtaaatatatgtatttttatattgcatataaaatatacacagtctgttctacaatgtgatgattgcatgcctgagaaatttcatactattaaaagttcattataaaacaatatttaggaattgagtatttgggggccagagtgccttttatatacattcttattacctttattttttgttaaggtaaacctctatattttgtgccatatatttttaaagcagaaaacaaaaatatattgtagctcagtgcccaccatgaagtaaacacagagaagcttctcagaaatggagcaccagccattttgacaaacagctgtggtttctgatgtttaaaacaatagcttttttctatgcactgtgctggttttgcatttattttacaagatataacttatgagagtgcacttaactaagtttgtattccccaactaaccagttgcagtatttcccaattcctcatgcatagaaaaataacgagtggagggaaatacaccaaaattataaaagtgattacctctgggtaatataattatgggagatttttattttatgtatatccccaattatatgatgggcatgtactactttataatcaggaaaaaaataaaagctttatagaataaaaagaatggaaggaaaggcatttaatttgatttgcatcacatcaagcaagccaaagaggcaaccttaggtattagtgtcttccctcaaataccagcaaatgctccagtagggaagatttctccactgtaaaatgactcttttatttccgcttttttctatgctatacctttggaaggaagccactatgcacagcccacacttgaggagtggggaatcatgcgttccctcctgtagggtagaatagctacataatttatttagaattcttctgcacagatttgtctcctctatttattaatttattccatcatttatatcagtatagattcatggatataatctttattttgttgctcaaattttccagttttgaccttgggagctctttcagttagctcctgtgcctctttgactgacatgcctccacctccccttgcttgtttgtaaattcccattccaacagtcagaaacctggcttctgccatcaactactgtattagtccattttcgtactgctatgaagaaatacctgagagtgtataaagttataaagaaaaagaggtttaatggactcacagttccacatggctaggggggcctcacaatcatggtggaaggtgaatgaggagcaaaggcatgtcttacatggcagcaggcaagagagcatgtgcaggggaactgccctttataaaaccatcagatgtcctgagatttattcactatcacaagaacagcagaggaaaaacccacctccatgattcaattacctcccaccgggtcactcccatgtcgtgggattatggaagttacaattcaagatgagatttgggtagggacatggccacaccatatcaaccacccatttacttaattgtgcacatccagtatttttgtatagtagtatcaaatttgttaacctgtaacctcatgggaaacaactttctcaactagaatgtacactgtttattgctcagttcctcttgcctttagtattacagactccactcatttccaaggttacttagatcaatgcctttttgccacatttctcctcactgaagttgttcatacatttgtaatatggtgagattctcttatcacagtttttaacattctttcctgggagcttctgatctcctcaatgattttttaaaatttatatacattaagtttaactctttttcctgtaaagttctatgatatatctgaatagattttttgttattctatgataaccacccaattataagaaaattattttggcacatcctagtaaacccaacttcataaaattgtaaaacttaacattgattgctcaagatattttaaatatccaaataatatcctgatagccaattacttatcaattcacagaagagctatatttttacaataaatctgaatgaaatctctgttagacattaaacaaagcccttgacccaagatcttcagcgatttaataaacatttattatgtgctacctgcattccaggcaccatgcttggcactgaaaataccaacattaatgagatctgatcattgcaggactgtgtattgaatgcagtggtagagatgcacaaagggcaatgtggaggcagagtgaagagccacctaaaccattccagtgaggcttaaagaatgagttagccagagggaggcagagaatagaaaagaatcttccaggtaaagagggcaggctaaagtcaccagggattttctagcataatgtacataggaaacttttataagttaaatgctggtagagttaggagttggggcaggattttgttaaaaaaaattaggttagtgagacaggcaagaactagataatggagagcttgtaagccacagtaaggagcttcaagtttatcctgtggttgacagggagctactgaagattgaaagtagaagagtgattcggacttggtcagatttgtgttttggagggctcactttcacagctgtgaggagtggatatgagggggaaaggactgaagacggggtggccaccaagaaaactgttattcaggtaacagaggaagcaggtctgactaggacaggagaacttgattgtacaagcatcagcctggcagatgccaccaggccaactgagcccctgacaatagcaaagaacccctttctgataaataagaaaagtggctgccctcatggaagactcttgataagtacttcattgatttattggctttatatcattttgtcccaaacaagtacttacggcacaaaggaagaaagaagagcaagaaaaaaaaatggaagatacacacaagataaacaaatgagtgaagaaatgatattttgaaaactgatttaccaatctatcaaaatgccaggaattcaatttttttttccatgtctctgaacactattaaaagctcctttctaggaatgacatgttgaaaatgaaaatgcctctttggaatttcttcccaaacacatcagttctagcccacatttagattcattcaatccactgctccagtttagtaattgcaatggaagcttcttactatacattttctcgtctggactccccctgtcattttttcacctgtctgttttggataaaaatccttgaaatatgtctttctctgccccagagacatcataaatctggtgtatttcttgtttcttagatggaagtttccagtaattctttggactttcataagatccaagaggccagagatatttttaaatatataagaaacaatgaaaataaaagaaaaaaatgattaaagttgcaattaatatgcctagagagaaataagccttgataactttcctatttttagaaaacccactttaaaagagaggcagatgctaaaataggagaacaacaagtatcgcattaacaaccaaaatccttcttccagaagccatgttgtaccaacctcaacctgtggtgtgtggttctcaaatcccctgagctcctaaaccagagaaattctgtgtcatgcaaatgaggcactcctgatagagtgaagctcactatgagcagtcagtcatcactttttgagccctggcactgtgctctgtgctacaggacacaggaaacatcagtctgtgttctcaaggagtatgctgagatcctgttaccttctctcattatactgtaaacatgatagcaagaaaagaactgaaaataaatataccaccatgcaggatgattacagaggctgagtgctgtttaagttaaacctcctagtttatggatgccccaataagccagaatgttcttagtagatatttcttctttatagaagcataaagcccatggatctaataatcattttttgcattcctagtatgtgacaactctaggctgggtactgggtaataataatgaacaaagagacaaggactctgccatcacaagcaatgagagggaaggagaaagggagaattcaaaagataagataattgcaaattgtgatgagaactatgaaggaaaaagggtgaagagaaaagaagaggggctgttgggacaagacataggtgataagagcagacttctcacagaaagcatcatgtaggatgaatgagagggaaccaaccaaggccagagtggaaagaactttccaggcagagggaacagcatgtgtaaaagcaggtcaggttgtctgctgcccaaagaaggagggcaggggtcaggggagatcatgcagagcctggtgactcctggtgccaacttcagtgttttttccaggtaaagccaaacacttgctcagtctggctactgggcagagaataggtcaagaggggatgctgcaaaagtggggccagtccagacatcaacacacattaaaattaatatgagattggcagggcgcggtggctcacgcctataatcccagcactttgggaggccaagacgggcaaatcacgaggtcaggagatcgagaccatcctggctaacatgttgaaaccccgtctctactaaaaatacaaaaaaaattagctgggcgtggtggtgggcgcctgtagtcccagctactcgggaggctgaggcaggagaatggcgtgaacctgggaggcagagcttgcagtgagtcaagatcgcgccactgcactccagcctgggcgacaaggcgagactccttctcaaaaaaaaaaaaattaatatgagatgtacttaagaccactgacatgtacacttaaaattggtacaatggtaaattttatgttattaatatgtatattttaccataacaaaaataatgaatatggacaggaaacagatatttcctaaagatacattgccatgaatgttgttccttctcatctcagaccaacaggagctccaggcagcaacgagcagtacaatgtgggaatggtggggacgcatgggctggagacctctcatgcggacagtttcagcggcagtatttcaagagaaggaaccttgatgattagagaggtaagttggtataaaaactgtgtagaggaaatgccatttcttcagtggtttttacattaaagctttcacagagaatgcctatggcatgtattttaagtatggggaattcttgggggagggaggacctgtgcttccaaatagttgagtgattttaattgtctgctgccttctttcctgtattcttctaagctctggcagtgtgacttaattatattattccaaattcttcagcaggagctatgcaaatcagaatatagaatttgggcctgaggatataaaattgcaaacttagatgtttcctacaacaggaaaacagaaatgaatggtctctctgaatagcatcactggccttgttatgtctcttctccccatggttttatcttagtggatttcgtataaaaaatgctcaatagttccaagaaatgatgatatcatcttatcttgttaaattaacattaaaacaaccgttaagttattttattgaaataacaaagaaataggcagatctacttcaaaaatgtaccttggaactttggttgaatttttttttaaactctaggaacatcatttcatttggggggtggcacatgttccctttcatctgtccttctgacatgcagtaactccccactgtgtccatgctaaccagaaagaccctgacaaattgaaatccgtcttttcctctttttcacttcatcatcaccatgcaagtttgagtgcagatatttacttggaaggaaagaaatggctgagaacattgggcaaatgttacctgacctctccctgcatccatctataaaattttataaataatagcatacaacttataagatggttgagaatattgagttagtaaattaagcattcaataaatgttaactattttatttcactctctcctcggaaatgaattctccttttacttgttatcaccatccagtcctccctctgaaacataaacatatgtcatctgtttttcctcttcagccaggacagagttgggaaactctaatagcagactttgctctccaaaaaggcaaagggcatctcactttcgtaagaaagaaaggaactgtagttttgagatgaataaggcctttgaaataataattagcagtggggctataactggaagactagttcacaaagcaacttgctagaatttcattttatgtccttgttgaatctttcaagtagcctttaaagagtcctttcacatatgcctgaaatgaaaaatggacttggctgctgaaattgacattgtgtagtgctggcatataaatctcttcatgtggttaatggataatttcaatggaagtgtagaaggcttctatccctataacttaccacttaggaaaacatgagggagaacgttctggagtgagttgctgtttgactccagataaaaggactccgatttctaatgtggcttaaaatttgcttgagtctttatgacagagtcaatacctccaagtagacatttggagccacattttcagttcattgccagccacatccaaatggctccatgttatttatagcactccagtattctatgaccacaacctgtcactttgaaaacagcatttgcagccgggcgcggtggctcgtgcctgtaatcccagcactttgggaggccgaggtgggaggatcacgagatcaggagatcgagaccatcctggctaacacagtgaaatcccgtctctactaaaaataaaaaaattagccaggcgtcgtggcgggcgcctgtagtcccagctactcaggaggctgaggcaggagaatggcgtgaacccgggaggcagaggttgcagtgagtggagatcgtgccactgcactccagcctgggcgacagaacgagactctgtcttaaaaaaaaaaaaagaaagaaagaaagaaagaaaatagcatttgccagtgtcttataggaatttgatctattaaggaacccaaaatatttttgtcctctcaatttccaattctgccttcctcaatgtgggttttttaaataacaaactgtattagttggggttctccagagaaagagagtatttacatatgtagagagagagagactgctttattattattattattatttttggagatggagtctcgctctgtcacccaggctggagtgcagtggtgcaatctcggctcactgcaacctccacctcctgggttcaggcgattcccctgcctcagcctcccaagtagctgagactacgggtgcacgcccagctaaatttttgtattttagtagagatggggtttcactgtgttgcccaggctggtctcaaactcctgagctcaggcaatctgcccgccttgacctcccaaaacgctaggattacaggcgtgagctaccacgcccggccgagagactgcttcattatgaggatgtagctcatatgatatggaggctgagaagtcccatgatctgccatatgcaagctggagacccagggaagctgttggtataaatcctagttggaagctgggtgaagatgagatgaaatgtcccacttcaaccagcggagaagaaaaagagggagaaaattccttcttcctctgccttttgttttgttcaggtccccagcagattagatgatgcccatcccacttggaaagggcaatctactttactgagtctaccaattaaatgctaattgcttccagaaacacttacagacataccagaaaaaatgtttaaccgaggcaccccatggtctagtcaagttgacacataaaattaaccatcatcaaaccttgagctgaaaattactaaaagtacatgtttaaacaagataaatgcaggttaaagtttatccctgacaaaataagaacataaaataaaaactcattataataagatttagcttatagggtgctattagtacagttctccaagatgaactttaggagaactcacccaacttgtcatcttgtggagtggactagatggttctataagaacataccactctaacactcatgatcctgtcagatgcacaaatttccccttgtagtgcatacccttatccctgtggttctacctatccctgtcctatagccccacaggaccactttttactcggttctagaatacaccacaccagctgtgagctgccatttgtccatggaagctcatctgctggaagaggtattttgtattatccactgctacccacacttcaccaaaagaaggtccctgttctcaatcttccttatctcctacaagcctctactgggactccatggacctttgtacacagcaccttcctggtatcttttcagcgttgatcctcctcactgaaccagaacactagcttgtcatcatgaaggctctttgggttacaagtaatgagtaaaagaacccacttaatacagagtaagcaaaaaaaaaaaaaagaaagaaagaaaagaaagaaaaaaaagaacattttttaagtcgggagagggtaggtatcagaaatagaggagtaaaggaagatttagggtatttcatggaaggaacccaaaggtaaaagtgagctgagcctctttgaaggactggaacagacaggagctcaggcagcttctcatgtgcaggtctctggctctcttgctgcctgtctctccttaccctaatctctgctttcttccacatttctcctttgctcttctctctctttgtagaggagctttctctccctctgcatgctcctgctttcacctctccacttcctccattgcaagatactcaccacatcccagttcaactgccagcagaaactgatccatgtctcttgggcttaatattaaattccagtgggaatctggtccctcttggctcaggcatccacccctgattcaatcagctgtgaccaggagtaggccccctaatacaacagtgcagcccagagcacctgggctctgccataggacagctgggttcaaaccacttagaacccgtgtcactcagggcaagataattgatggaatgtcatatataaagtgtttagcacagtacttggcatgtggtggtacacagaacatctttgtgccaatccccacgggaatggtgagagataaagacgagatattattgaggttctgttaatgaggttcttaaggctgttgtacatctgtctttgtgtttccagtacagtacttggcacacagaaagtgtttaataagaaggtgctggtggagtgaacaaaagggtgatgactcagaagtgggcagattcagagcatactactggattcctttaagcttctcactatctgagccacttccccttgttagcctctctgagtctctctttgataaccagtgtgtctgcatcagtttttggcttgagaaagagtgctgctgatacaagagaggccaaaaaattccaaagagatgacatgtgatttatgctaaagagaggtttggggaaaatgtttaaaagcttttcagtatttgaacagaagttaaaagaaaggagaaactgcccagtatacataaagtagcacacaataagatgtattaggactgaatttcctaaatgtcatttagaaaaggaaatgctcaactctgagaataggcactaatacacgctactgatggccactgtgacaaaatgaatccagaaaatgttcctctccaggacagctcgtagtccaggagcaggttgccaagaaacacaaaggacactaggctttccagttatctctcaagcttcctggaaacatcaattacatgcaccattacaggagcttgggagtctgtttcatctaaacaagaaaaaagaaaagaagtgcctcctttcacttccagccagaggcaggtgcagagagctgtaattgcaaatccatgacaagctccagaagtaaaaagctaggctggtgagatggtcaaagaaacagcatgaaaccttgcacatgccagtagaatgctttacacttagtaggaactaaaaaatactgtgttgatgaatgaatgaaagaaaaggcagagagggaaatcatcacttaatcagatctgctctaagaatcctcaatgagccagttgcataaaagttaaaaagtgcaacactagtcaggcctacaatgtgggcactggcttttggaaaccagagttgtcttttaatcttgcctttcctccctggggtttttttggcagagactgctctccagagcaatggcttccaaacttgttacatcacgtaatcctatcagtaaaaactgtacagcgtgtcacctaatacagtgtatttattcacaagtcatacatttttttctactgcactgacattatatacattataaaatacctttggccgggcatggtggttcacacgtgtcatcccagcactttgggaggccaaggtgggtggatcacaaggtcaggaattcgacaccagcctgaccaacatggtgaaaccccatctctactaaatacacaaaaattagccgggtgtggtagcacatgcctgtaatcccagctactcaggagactgaggcaggagaattgcttgaacctgggatgcagaggttgcagtgagccaagatcgcgccactgcactccagcctgggcaacagagtgaagagtccatctcaaaaaaaaaaaaaagaaaaacctttaaaggacattaaaaagggatattagaggtgatgtttcaaatgctttgctagttatgactttgttactgcctacatcacaaagcaccatagttatttattgagacataaacatttatgatagttgtaaatccatattttcaaatagtattctagatcatgtcaatatatttggaactcctgtcagatctgattaatcattgttttgaccttgtgaatgacaaagagccctgtgagttaagtatggtctctgccctttcttggagtactccacacacactgcttcttttcagcaacactttaggtcgtttatctgttgtgtgggtttgtttcattgtaacctggtaatatgatctgtaaatatatataagtggcaggtgcatacagcacaagtactacaaaagagtttacaagtgtgggccctgctcagtccctccctttttgtagcgtctccctctgtacatgggactcccatgccatatgtgaccactgtctgtacctcatgcaggaacgtaaggcttcaggctcaatccataaactaaatattggcaaagcttaatttcttttttgttttcttaagtaaaatagaaatgtgaatatcaccttctcatgccctagtgggttgatttggagccccgtatgcctatgctgtgtgagggctgatgtcactctgtggcctttttcccccctctctaactcctcccacgtgctgtgctccctcagacgtctggagagaagaagcgatctggccacagtgacagcaatggctttgctggccacatcaacctccctgacctggtgcagcagagccattctccagctggaaccccgactgagggactggggcgcgtctcaacccattcccaggagatggactctgggactgaagtaggtgctgggcaacagctgacatgacagttctgctgtccttcctggggttctaaaaccatgatctcttcaagaatgaggcttcgccaagctccttgaaacttgtttggttggtttctaccatagagctacttatgcagatactcaaatagagaaatcatggaagcagagcagtgaaaagttctcagatatcatctgaaccaatacctgtttctacagatgagtgtactgaggttcacagaggttgaatgacttgtccaagacacacagctggtttgtgacagatctaagaccagaactgggacctccagttctgatggaaacttcaggctacacagatttcaaggccaacagttgaggtttatatttgtgttaatttagtcaaactaagtatgacttaagtaaaatgaagtttaaatgatttgtttatgaaaaataaaatttaataaatagataagttcttagagtgttcatctttcataaattcaaaattgtgtgagaagaaagaaaccaagcattacctttcctgtagagaaacagccccagcgaaaagtctgaataaacacaatctgtaggtagtgcccatagacgctgatgactgacaccagttggatgagttcacagtgtgtagtcttgtttcattaacagtcttgtcaatcacacgtaaggccctaaatgtgtttataaagcacatgtactattatttttgacattgtccacacactaagtttttatgatgcaccctttgaattctaaagttatagagtagatgagctttgcataccccaaggaaaagaacacagtgatatactgcaaagcacagcatcctattgtaatttcatgctgtgtgggcattttctgcctgaacacctctcttggtaccaaggaggacaccataagattgaaccctggttcaaattctgctgctgccccagctctatgtggaaatgttagtgcctgccctacctctttcacagacatcttccaaagatcaaaagagaacatgtacgtgaaagtgttctatttggtagggggaattcaaccttgaggaggatgaaatggttttgatttcataggatggaaagaaaatcttgaattaaatcagattagatctttgtggttttctccttatatgtttagaggtcttggatggtggttttatttttaaataaaaacctaacagtaaaactaaagtgaaataacctttagttaaagatatttatccaaaaaagatgtgcttattatgttgaatacagatgtgtttatgatgttaaaggacaagaatagaagaaatggacatgactgacattgcagcttattcagcaaaactcaaatttagaatattgtgacataaaaccctgatattgagtttactgttccctcatctccttctgacatcatgttttcatggtgccattcaagcccaagattcattttttaaagtaagccttcaaggtacattgctcacaaacgtaatatcctcatgaagtccctaaataaggatgtaaatgtaattattcttttaaggaaactatcgtgggaaggaaatatcttcaattccagcataaaatcatccctgaattgaggattttaaagcttttggagccaacaccaattcacttgcatcaccaggccagagtagaagggctcaaagctctcctccccaagagaaagccccttggtttgactctgttcaggataaagtactgctgtataggcttccttacttagtttattgccaattatgtcagcttttcatattgatcaagtagtcaatataggaggttgcttttactgaaagggagaggtaagctctgtcaccacagtgatcttacagattttaaggtgccacatgtggtccaaaatgtaattttctcactacaattcttgcagtctgataattaatgaagtcctacgaatgcacaatgactagtgagtaaccaataccagaagaagctggagacaggcacgcactgactagagcactagaatgtgaacacctgaataccttgaagaatctgtgatcgttttacagcccaagcacagtattgttagcattgttattcctgcagtatttatctgctcttcttaatcttcttgcttattgattagtatggcatggggagcagcaccaaagcctccttcaccccctttgtggaccccagagtataccagacgtctcccactgatgaagatgaagaggatgaggaatcatcagccgcaggtaagcaagaagggccctgtgtttaaaaaacagcttcgtcttcctttctggtatgacctgataaggaaattaatcctcagttcagtagttaagctgattactgcttaggtcctatcttaaaaggaagactttttaaaattattatttctgtaggactcctaaaacaaatgtattactttccattttttttcccatctcttctatttcgtttctggtagacccaggggtacatagggaccctaggaaaagctgttcctcagtgatctctgaacataactaaatgtttccccaaaacaatttctgggtacaatgttttacacacattaggcacttaataagtgtatggtacattgtgttgagttctaggtgtgtgcttcccaccacaaagatcaggctgatttaaaggagtcttgctttctaatcttcttcaagtaattaatcatcaaagtcagcttaggacagtttttcaactgataaactgcaattttaaaaagtagatcttttttgcctatatacaagagtggggatggtgtatttaatttgggactttctagactctgcaagtagtgtctataagcctgtttttctaatgaataaaagattcctttgatgaatgacttagactttattctactaaaacaaaaaaaaagtgtaaaataaggagagtttcagagtttccttgcctttactataattcaaaccaaacaaggagaaatcatagtgttttgaagccccatctccataagttatcttttaagatgtcactgacttctctgattctttttctcaaagctctgtttactagcgaacttcttaggcaagaacaggccaaactcaatgaagcaagaaagatttcggtggtaaatgtaaacccaaccaacattcggcctcatagcgacacaccagaaatcagaaaatacaagaaacgattcaactcagaaatactttgtgcagctctgtggggtatgttggtgctttttttttttttttttttaaataaccactcattaatgaactgaccctcaaacattaaaagcctgtggatcttgtcatcaaaagaacactggttgaatcctgggtattagagacctaacttgggactatcttgacctcaggagaaaccaaaaggagttttatatgtagaaatagctgatacgctactagccaggaagacgagattagattcagagcaaccttgtcacacaatagtgataggctaaagccaacaagagaactagctaccactgaatacattgagtgggcaaagcaaagcctataatgtgatcaatcagaggcgatttgtgtctggcactttgtgatataccccacgttcattctccatgatccataccacatcctgcaaggggaatatgagcataaataatggcataaacctttatttcaagctgaaaaatcagcccagagtatttttgtgaattactaaaggtcataaccctagcaataacaagataaaacttgaaaagaacaacaaataatttaatgaactttcccttttagtttaaaacatcaatctgcattttctcgtgaaaaagatctgcaggttttagctgacctcaaactcaggagaggcatgatgagattctatcaaagtcttggtctgtgttactataaacatctcatacagattaaggaaggacatgtcccctgtgtacccactgaaaatactaggcttggattggggaaccataattttaaaaggctgaaagcatttgagatgttagcggggaagagtgtgaagcctaggaaccatttcatgatagaggctctgtcctctggagaagagacagaagagaacaagatagccacatttaatactgaaaggattaatatatggacaaaaaagcagacatttgtgttgatcagaagatagaagtacaagacgtaagagaagttagagagttacatgttcatgaataaagtacactgcacaatgagcctctcaatgtgtgtgtgtgttgaggggtggatgatacatttccctagccataaatttttaggattacaactacccagacaaagccacttatgtgcctgtgcttctgtaatagggattactgcatgggtgttgggctgcactagatttagagacctgagaagtcccttaaagtgagtatgtctgtgactctccagctattaacacttctcttgaatgggtttatcatttccctaaaaaagagcaaaaacttgagggtatggggcataagatagttacattttgattcaagaaggaggaagggcctttcttccattggagtatggaaatggaaattccactgtatattgaaggtgggtaggctagagaccactgcataggggtgggggtgaatcttggggaagaagagaagtgatttatagggagagccaagaaagaagtggtttttccaggcagggaataaaggcaaattatgctagcttcacatctgtgcctaaggctcctattgacaaggactctctgcattaggtagtaaataactagatgtatgaatgctgctaactttataaaagaaaactgtaatttcattaccagaagtacaatgatttaattattatgtcagagcttctacattcattagtttatatttacctacttgcccattagtgtatatttacaagtcacagtttcttaaattttatagggactctcgatgcagaagattaaagttcatgaaaagtcagtcttagggtgcttcttaaatttacaggtgtaaaccttctggtggggactgaaaatggcctgatgcttttggaccgaagtgggcaaggcaaagtctataatctgatcaaccggaggcgatttcagcagatggatgtgctagagggactgaatgtccttgtgacaatttcaggtatgttactaagatgatgagtcccccaggtccatacagcgggaaagggatccacctcatttctgcagaaacagttagttctgcccttcccagctaacaaacaacacaataaagtatagcagtatagccagagtgagattgcccacattttgtaacactgggaattctgacctccaaaaagaagtctctcacctctgcattaaatctgaattaggcagagacataccacaaaggctatatatttatagctctttacctctgtcaggactcagcaaggatcttcggatgtttttaaggtttctgcactccagttattaccacatacagacagaatatcaaaatgcaggcttcctagagggacatttagtaagcagaaatttcttggtctcttccctcaaaaattctcttgcttatagcccactgatgttttggcaggtgcagctggcacactgggtgatcaagtctacaaaaagatttgagtgtgggaatcattactgctatgctctgtagctttctgattcccaaaaagagccttatataggaaaaaaaaaaaaagatggagactaaagtgaaggccttgtaacaagttaaaaatgcaacctaaaagagggtagttttgttgaaagttttttttctttttggtatttgaaggagtttaacgagtaacacccgtcacttcccctctcattccatctagtatggaaccaacttgctactgcactttataatcacctagggagatgtgaaaatctaggctgcacccccagaccagagtcagaatctctgggggtggggtttaggcatcaggagcgttcatagtttctgatgtgtttccattgtacagccaagtttgagaacatggatttatgctcagccattgtttcacgaagagacaacacagggatgctggtttgaactttcctcaaagttcagctgtacttccattttgacaaaatgcttttgcttgtcactaaacttcctctttcttttacctttccactgaatgctcagtttcatctctttttattctccccaaataaggttaaccaggtaaattccttttgtattgccatttgagtttaatcccatgtagtcttttgttctggttaattgctgtcctgattgctatactaccaaatcaaaatgaaaactgcatatctgccaaaagtgggaatgcaaccagaaaattcacattcagacttcattatgttgttagtggcacatcttcattcttaacagtgtaagagtttccttttctcatgaggcacagatagggaaaggagaaaatgaaaataggagcaaaagattcttgaactaaccttggattcatattggcatagaaaggaggaaacactggctctcgtgtccatcctagctactgtgatcaatgtggattctaggcctttggttacaaaattgaatactgaccacacaatgattcccttagtttaggtgatgaatgtgctctcctgtcaaatgcatgtgtaatgctttactaagttctcttctgctggtatatattcatctataaaatataaaacattttttttgggagaggccgaggcgggcggatcatttgaggtcaggaattccagaccagcctggccaacatggtgaaaccccatctctactaaaaatataaaaattagctgagcatgctgggagcggcacctgtaatcctagctacttgggaggctgaggcaggagaatcgcttgaacccaggaagcagaggttgcagtgagccgagatcatgccactggactccggccttggcgacaaaagtgaaactcatgtctcaaaaaaaaataaataaataaataaataaaacatttttaaagcctaagataaagaaaaataagtatccaaaaaataaaacccatagagctaaatttatcattagttaggaagagtcatcccaatggacattttatctggtgcaaatcatcaaatggagtatatcaagttttgctacttgtgtactcttcaatattgtctaaatattttatcatcctatgaattctttattccaagatcactttaccaaacggaaatttaagttttcaagtttgcatcctttttttcctatttttgttcagtattcctttcagtgacttcagcaccataaacctgcccagtataattttctgaacccatattatcctcttgtttgttattaggttatacggtgaaggaaaggcaggtgccaaaatgcccagttgccaacacttcttcatgtgattgatctagaatgttctggaactctgatcactctgttgaagagttagctcttactaagttcagcagacactgctttgcattgggaagagagagtaagagcacatgctcaaataagaaaccacctgaagataaaagacattgtaattctgtgatgtgtctaaaacacgtagagctattttaaccataagttctggcagaaacaccattttaatgacaaagtgctggggacactggttattatgccttcatacacacacacacacacgtaaataaaataaattagaaataaatggaggtggggaaggaaaaagtgagagctgtcacagcaatttgaaattaaacctctattatttcaacaggaaagaagaataagctacgagtttactatctttcatggttaagaaacagaatactacataatgacccagaagtagaaaagaaacaaggctggatcactgttggggacttggaaggctgtatacattataaagttggtaagtctcaagacatggaattataagtttggtctgtttactcaatcagacttacttagttaggtttcacctagttttttctatcagattgatgatgcatgtgtgaccagcttcagatgttgctggaaccttcagcattatttatattttttaaaagccagattgatgaaattgaaagagtgcattcagaataaagtcctaggctccagtttgaacatttatatctactttcttccaaagactcattaaaatgacaagaaaagaataaaaatgccataagcctatgaggacagtgggaccaagagaagagaagaaatgtcggtaaaatcgaaagagtagctgagtgactggaaaaagacctagaataccaggaaattctgaattctgaatctgcagtgaggaaaatgatcaaaatcaatccaacagaacctggaaaggcccaggaactaaggccccaggggaatctcaggtggaagtggaggtgtaaggtgggactgaaaatagaattgttagaaaattcatgagcagcaagtcttccagaacccagtctccacctctgagtaattaggccactaccttcctctgctgcaacagaagatgaaaggtttgcacagccaatatgatgctgggaatacttgtgaaaacacacacacatacacatccctctaacccctacttagctcccaaatagccatgcctatactccctgggaagagaatgtaagaaatgtctttggagaaactaaatggccagaaagaaaagatgtacaggtactaacatttgaagtgccatgaaaaaagcttgctgcctaactaccctaaagataagcctgtctataccaaggagtggagaaattcacaaatatgaaggaaacctaaacaaacagaaagaaaggacgttagaagaaacagggataataaggagtggaagaaaatgtaaaaagaaagaaaggaaggaagcaagaaactataatagctttacagagattagaaaacttctttctataaaacaagaaaagggctgttaaaaaaaaaggtagaacaaagtaggggaaagtcatttagagaccaagaaaaaattttgcaaactaaaatgtattggcagaaataaaaaatgtaataaaagtgttagaagataaggaattctcctaaagagtagaacaaaaagcaaagcagagaaaatataagaaaataaaaagatcagtccaagtggttcaaaatctaagtaataagagttttagagaatatgaaatgaaagtattgaagaaagaatataagaaaggtatctagaattaaaagccttgaaatcccatattaagaggattcactgagtgtccagcatactaaatgaaagaaagactcacaaaaagacatatcaacatgatatatcaatacctgggaaatgagaaggccttcaaaactggcaaagctgtcagaatataagtaaataaataacaaacagtttacatacaatagacccagaataagtgtggcctgggacgtctcagcagcaatatagaagcttaaaagacaatacagcaaggccttccaaattcccaacagaattatttccaactagtattttatagccctcctgtgttaagggttaaggagatatatatatatgtgtgagtgtgtgtatgtgtatacacatatacatacatacatacagctgtatatatgtatgtacatacatatatacacatacatatgtatatatatgtgtatatacatatgtagagagagagattatgaggaattatttcacatgactatactatacaggctgaaaagtctcaagattttcagtcaacaagctcattcagacccaagagagccaaagttttaagtccagttcaaatctgaaggcctgagaaccaggagagctgatggtgttgttccactatgagcactggtaggctcaagacccaagaaacgctgatgcttcagtccaagtctgaaggccagaaaagactgatgtcctagctcaaccaagcaggaagactcagcctttttgttctagtctggtctccaaatgattgcataaggcccacccacattggggagggcagtctactttatcacacatgatttactcctgtcttaaaaatttacttttcatgcaccatttctcaggaagcaactgaaggatgtgttccaccaaaataaataactaaacctagtagtccaggaagatgacgaaaatacccagaatgatggtgaagggaacctggggtgacaagtctgccacaggcctagaaagaaataagtcctggcagagtgggacaatgcagggttccaggaaagatgcctccaagaaaaataaaatggtataaatagatgacctgctgcgtttgaccatgttgaagggcatttatcagcagaaagtttacatgtgcttagagagagatacatagaaaacaagtataaaaaaaaaggggggggggaacaagaaaggaaatgtaaccatggtatactacatacctcagtcatgaacaataataattttaacactcaatattgatttaaccaaaaatttaaaatacagctatatttagagtttacagaagtaaatcgtgtgtgcatatgcataagaaagagaagaagctagagagagaaggaaatgatgtgagaaattaaatcctttccatactacaaagtcagtaaataatgtctgtgactgaaaaaaaaaaatcaaggaataacattataatcatgttatttagaaatctggaaacaaattgctgaaagaagtagttgaaagagttgcaagcggttgtttttatggagcaggaatcagcagggaggcaggtacttggttttcataagccctagagttctttggctttttaaaataggtacctgtaagacttgttcaatccatagctgataagaaaatgtgtggaggcttttaaaatgtgtactagataaaatacattaattatttaacataaagaatgacaataaaggagcggcggaggaactttagacaccttcagttcaaaggagtccatgatgtggtctcagaaaagtatgagacacatttgaaattttaaccagtcaagtgggtccaatcatgtgtgatgacataatgtcggctgaaatctaatcaagtgtatcaaatacagaatgtggaaacagaaggggcatgctataaagaagagctcagaaagaaagaacttcagtgtatcacattttgccaactagaaaggggactctattttgaagcagagtctccacctgccttttctctaatttcattccaggtgaccttcccagataaccttgacacaatattaggaagtgttggggctggctagtgaacctgaaggtttggtgcctgagaaggacatgttcctcacttaataacatgtcactcacagttttacaaaggaaaaaaaaaaagcccctgaccttacaacattatctatgtcttacaacatagataatgtatgtattgataagtataaaaagcagcctttgggccgggcacagtggctcacgcctgtaatcccagcactttgggaggccaaagcacgtggatcgtgaggtcaggtatttgagaccagcctggccaacatagtgaaaccctgtctctactaaaaatacaaaaaattagccaggcatggtgatgggcacctgtaatcccagctactcgggaggctgaggcaggagaatcacttgaacctgggagatggaggttgcagtgagccgagatggtgccactgcactccagcctgggcaacagtacgagactccatctcaaagaaaaaaaaaaaatagcagcttttggaaaaaaaaaaaacgtttaatgtctgtaaacgtatgtggccagagccacatctacatctcaccggcacttagcacagagccaggcccagggaaatcagttaagaagtatttgtttttttaaaaaggaatggatgttcaaaggacatagctttattcataaaccagaccacatgcgggaatgtttttctatagcaggctgggcagcagtgcaagctatttgctccactgtacatttttgttcaggaatcagaattatttggtactttctaatagggataccctggaattctaattttttcttgtcctcaatctgataatttggcaaagtataaaacatacatcccatcattctcacaccaaatagaattcagattcatatgcatatttggttttcttttgaaaatagtgagctgctttctttgagaacaggtcatgttttcaggggaaagcaatagaaacaatttcaaagctgtttccttttgagtattttgcctttattacttggcatttgttagtccaaagatttctagtgatcaaattttgtgtccataaactaatactgtatgattacagagcaataaaattcattgcaggaaataatgcaaaatttctgaatattatctcttgcatatacctgacaagtgtttttcaaaaacatcaggctacaggaatcctatttgacctgcacatctactgttggcccttctaacatttctgacgtcttccttctaatcattgccgtcccttcattgtcctaacatcagtaggctgatctatatccacacatctaaagtaaaatttaaccagggagcaatatctggtaattctctatcagaaaacttgagaccagcttaattttcagaaacactgtttgccttagttatccaaagaaccacttgtagtttccacttagcttcccctatgaaattccagccacaacagcactgacatcttcttgtagcacgagtattctagtatgttcaaattcttgtgaaattttaaaaatataaaatgagaataaaaaagaaaagcaaattgtatatccaagagtcatttaaaatatttcttgatttatctgagcctatatgtgcttagataagtttttattttcaagatgattttaaatttctttaaaaatataaacttatttatttcttctttcaccctgaaaatcagcaaaatctgaagggatttttttttcttttctttttaaaatttattttagatccagggggtacatatgcaggtttgtttcatgggtatattgcataatggtgaggcttgggcttccagtgaactcatcagccaaattgcgaacattatacgcaacaggtaaattttcagcccttaacctgccactccccttttagagtcctcagtgtctattatttccagctttgtgtccatgtgcaccccattgttagcttccacttataagtgagaacatgtgttgactttctgtttctgggttattttaccctaggagattggcctacagctccatccacgttgctgccaagggcacgatttcattctttttatggctgcatagtattccatgctgtatatatacaacagtttctttatctaatcaaccattgatggacaacttgataccatgaccttgctgttgtgaacagtgctgcaataaatgtacaaatgcaggtgcccttttgatttaaaaaaaaaaaaaaaagttattttcctttgggatttacccagaagtgggactgctaggtagaatggtagttctatttttagttctttgagaaatctccatactgtttcccaaggagactgaactaacttacattcctaccaacagtgtataagcattcccttttctctgcagcctcaccaccatcttttttttttttttttgaccttttagtattagccattctgactggtgtgagatggcatctcattgtggttttgatttacatttctctgatgttcagtgatattgagcatttgttcatctgttggttggctgcttatatgtcctcttttgagaaatgtgtgttcatgtcctttgcccactttttaataggattttttcttgttgaattgtttgcattccttgtagaaatttgttggatgcatagtttgcaaatattttctcccatcatgtaggttgtctccttactctgttgattgtttattttgccacacagaagctcattagcttattaattaagtcccatttgtctttttttgtttttgttgcatttgcttttgaggtgttagtcataaacatgttgtctaggccaatatccagaagagtttttcctaggttttcttattatagttttgggtacatttaaatctttaatccatcgtgagttaatttttgtatatggtaagagataaggatctagtttcattcttctgcatatggctagccaattttcccagggtgtcctttcctcattgtttatgtttgttgactttgttgaagatcagttggttgtaggtatgtggctttatttctgggttctctattctgttccattgatctgtatgtctatttttgtatcagtaacatgcttctttggttattacagtcttacagtatagtttgatgtcaggtaatgtgataccttcaactttgttcttttagcttaggattgctttggctatttgggctcttttttggttccatatgaattttagaattgtcttttctaattctgtaaaaaacaacattggcaatttgtagactgcttttggcagtatagtcactttaacaatattgattcttcctatccatgagcacgggatgtttttccattcatttgtgtcatctgtggtttcttcatcagtgctttgtagttctccttgtaggggtctttcaccttcttggttaaatgtattatcctaggggtgtgtgtggggtgtgtgtgtgtgtctgttattataaatgggattgagctcttgatttgattctcagcttgagcattattgatgtaactgatttttgtgcattaattttgtgtcctgaaactttactgaagttatcagcactaagagtcttttggaggaatctttagggttttctaggcataagatcctgtcatcagcagagataatttcacttcctcttttccaatttggatgctttttatttttttatcttgcctgactgttctggctaggacttccaatactataggagtggtaagagtggaaattcttgtcttgttccagttcttagggggaatgctcttagctttttcccattcagtatgatgttggctctgggtttgtcatatatggctcttattattttgaggtatgttccttcaatgccaagagctgtggatcttttcctaggtttcagatgaagagatcagcaaaaatagtctaataaacactttatgtcatgaaaagttataaagcaagtaactggaaacttaatgtcatttaagtatattaaaatttttcctacctagtttctttaggactcagaatattctgtttcttgagatattttaccaagaaactgactgccatgtgtaccaactgtggattacgaattctctaagaattagaatccacacttaacagcaaaagattcagaaggcacttaaaggattgttcaatttctcaaggtcatcaccgtaaacattgcttattattctatcagagacacacacgtaggtaagagtaatgaagagaatgccagacaacagtctgttcttccatttttccattcaataagcatttattgagtactactttgtgtaggcaaaagcattgtggggactcaatcatttaactaagcttctgtccatagaatttacaatgcttaatattccatctttctaaagagtaaaaggatttgtcagtattcgtagccctttaagccactaacagaacccaagactcctaacacccccctttcgttagaagcataaataagcaattatttcacttggtaattggaattcaaatataaataataagcaaatggcagcctttatatctgcccatttgctaatttttctaccatcttgccatatctgctctcagctacttaaatatgggtgaacgtaaaagccaggcaagctaacatgaaggaaattatgcacattcttattacaatgaatatcaacatcaagacctagtgttaaagacagtcctaagcagttatatctctggatgatgaaaagtcttcaatataaagcaaaagccataagtattctgccaaccaaagttcgctaagggaagctaaatcagtatctatgaaaaaatcccacaccaggaatatcaccttcatgaagctgacacccaacatcaatatttaaatttacatattgttgcttatacattcattaatattaatacaaagaacttgagtaaattgatgtactttttcactcataatttttctattacagttaaatatgaaaggatcaaatttttggtgattgccttaaagaatgctgtggaaatatatgcttgggctcctaaaccgtatcataaattcatggcatttaaggtaagcagggatgtgattatctaaaatgtgctttttaaaaattttccgtttctacccattaataaaatagtccatatagaccaataccaattttcatatagataataaacctgttttaaaagtgtaggtactctagggtttattgtttcaaaagtaaagactgaatatttgtaaatgctataaaattagattaaaatttgggtatgccctcctccttgagatctatgaatcatcatcctcaagaggcatttagaatggttagtaggcatagcattgattatgatcttatgcaatgacatttgttataaagccacctaaaccagggtattccctgatattttgtttgaaaaaggcagacaaatggcagcactgaatctcagagttaaactgagtctcttttaatcctcataaatctttctgaatgaagtccctaaaactcaggtgatgcttatatgtccccagtgctaacttacagaaatgacctagtttctctgcattcttctattttgattgccttttcatttttttaccttgtctaagtctgtacccaccatggttggattggtcactcatgagatttgccaggagtgggatggggatatgctagtcctgttgaccccagctcatgaagctgacacccgaataccaggaggaccagtacttacaggcacccagatgtgttcagagccgcataacctatccatagcccaagtgaacttatcttctgttttctctcactctctctctctgatctctctctgtctctctctctctcagcttatgtctgtctacttctttatgtctcattggctctcactttttctccccacctttatgactgttatctccatttggctccttattattttctgccacattctcatgaagggcaaaactgcccttggaacaccatgtaggcccacttcagagctgaatcacttctatcttgttcccttagggcagatggcttctgatgtgctcaagaaaatagattcattaatggaaatgggctcccctccatgacctcacttttatggaaaaaaattggaatgcattaggttactaataacaagggataactcctaaaagccaaagtggtactcctgttctgccaaaatctatctccacaaaagcttttcaatcaacatcccattcccattcttgctctgaagttattgccattattttatgacccagagacacatgagagagtgcaaaatgttctttctgacagaccctatccagcccagaaagagggaagagcaaaggcaaagacttgaacaggaaagagtggaactggcaagaggccaagccttcccataggacaaggacaggacgctagagcttcccatgctgtcagaatggtgttagcaaaagatgagaagagaagggtctgagaggtagcagtggcattatagttaaggcaattgtagtttcacaaatgctctcccagatctcaaggcccaaaggtagagcgtggttaaaaaatagcaaaggaaaatggcagaggaacacttgacagttagttggggcttgggctctggattcaaacacagagaactttgacaaacttggcaagatctctctttttgctttctagttaaacccaaatagtcaatgcaagccatcaatcttgtgatgttccactcccacctctttctctaccacccaaacccaagtctcagattccaacattaagagaaagtgccaatcttatgcctactcattcactgaagaaaaatccaaaccagagcatgcccattaatactaaacaggctgagaaaacagccggccttggctgtccctcccaggctgtctctgaaagggtagttgctgtggatgggcctggttgccacatgggaaagaggggggccagagaggtgactgggccttcttcagaggacaaaggccagaaataaacaggaaaaaacagcaatacccaggcaccaggtttttaatatacattaccactatcaaaatttacacctgtgcaccaacttaaacttcactgccccgaaggacaaagggtagagaaaggggcacaaatggatgctagacccttcctcctagggccagaatatcaacagacctaaaactgaaagagaaattttctagtttttcactttaataaagttagaagttaacttcctctagacagtggctaaaggaaaaaaattaagatgcctctttgagtgatgcggatactaatggggtgatttttaaagtcttttgcagatctccagcacaagcctctgctagttgatctcacggtagaagaaggtcaaagattaaaggttatttttggttcacacactggtttccatgtaattgatgttgattcaggaaactcttatgatatctacataccatctcatgtaagtactcagaagtagactttcaagggctctctgtacaacagcctgcatgtagaaagagatttgttttgcatagttttagtagaagtcatgcacactttactaaccagcaaatggactttcgttcttcattaagtatactgcttttaataactaaaatatataaatttaactaatttttatgacttcctaaaattggggaatacataatagaaatcatttggcatttacatgttgtctctttggactttagattaaaatgaatatgacatatttctttcaagggcatgaattatattcggtagacaagtttccacattcagtttttgaagggaaattcgttcattttatgttagagaaagccaatggtcaggtactaatttattggagaaaattctttttttgctatttttagttcctctcttcagcttgagggcagtgtggtacactggagtcagacacagtggctctagcatgtattagctttgcagtaatggacacagtaggcagcctctccaatcctcagctttcgcatctgtaaaatatggataaaaagacttatcccataggattatcattagtattaaatgaggtaatggatctaaagcagttggtacagggccctgcaaattgtagatcttcttattagccctaaaatattcatattactatcctgacatattgcttgaaacataactgttaaagggaaatgctgcacatggattcacttattaggattaagtgtagtgtaaagtgtgtgtcctgtgtgtaatcccaagactaacacacaggagaaactatttatcaggaatgtttgaagctaccgctgactggtattttgagagttttaagactttattctaatgaaacgcaataactaaaagaagttgtttcagtatattacatacacacacacgactgccattcattgctgcattattaccacttttaactcatgtggatgtgggtgaacacaaggactcacagctcacattcctggtgaggcagctaaggtgtaactatgataatcctcaactctcttagtccaatctgtcaagcacatgttgggctgccatggcattctcaactaggggatcacaacaacatcacatttcctttcctagaacaaattaatatacacttatttcaatagtgatttttttttttttttttttggatacggagtctcgctctgtcacccaagctggagtacagtggcgtgatctcggctcactgcaagctccgcctctcctgggttcacaccattctcctgcctcagcctcccgagtagctgggactacaggtgcccaccatcatgcccggctaattttttgtatttttagtagagacggggtttcatcgtgttagccaggatggtctcgatctcctgacgtcgtgatccgcccgcctcggcctcccaaagtgctgggattacaggcatgagccactgtgtgcggcaataatgattttttttaatgagtggtcattctaaatattttttctaaccaagccatgaattattctggcatttagacacccggataaacaatcctatatatatatttttttttcacagattattttggtagttcattttgaccccacttaagctatctccattagattcagctggcttacattctcctcatcttcttttggaagtggttgtgctaatagaaaacacattaatttcaacgtcagcaagatatacacaaatcccaactctaccaacaaatactagcacaactttggttaagacacaaagcccttctgagatgcagtttcctcatctgtaaacaaagctatctaccttggggagctattgtaggtactagaaattatatatgtaaagggccccatgactggcacatagtaggtgtgccatagatttacatgctctttttaggaacaggtaaattgaatttttaatctagtgactaagtttgatttaccagggtattttacaagtcagtggttaaattaaagcaaatttcagtctttagggtgacaatgaaaataaacaaaaacctcttttttgcagttgttagagatgaatagtcaaggtgttttattttttaaaagaataatgcttggcttttctttgtcttctagattcagggcaatatcactcctcatgctattgtcatcttgcctaaaacagatggaatggaaatgcttgtttgctatgaggatgagggggtgtatgtaaacacctatggccggataactaaggatgtggtgctccaatggggagaaatgcccacgtctgtgggtaggttaaccattccttatctccttcagcagttacaccccccaaatgaaacgaaaatcaagaaatgtgaaacaaccatttgattccacaaaaaaaaaaaaaaaaaaatctgtgaataactcttgtaagacttgctttgtccatttatctcaagtcgtttgtcatttttgtggttaagatgtgaacagatgctgtgagttattgcccatctaatgtttttaatgcagttttggaaattccttttgacagcctacattcattccaatcagataatgggctggggcgagaaagctattgagatccggtcagtggaaacaggacatttggatggagtatttatgcataagcgagctcaaaggttaaagtttctatgtgaaagaaatgataaggtaaatccgtttcaacatttgcattagtgtttgcattttaagagaccaccaggtacctgtgaaaccttcattttcctttatactgatttgaatcacatctgtgttaaacaatcaatattatcttgaaatggcattatttggtttgatccatgtgagcactcaatatattattcacatgtcaaaaactacataaaaacatttagaaatttcttgtaaacctcttagaaacctttgtggcctaaaggccttttgatgactcagcagacaccccaaattctcctaagcacttagagcagttggcccatcattaatcatctcacagtgggtcaactttatacttccacttttagacttttcacaaagtcactttcaagacctaaccaatcaccttatattcacctttaaatccaaaacatttgacgtttagaaatataagctttttaaaaatgtcacccattccttaaggaatgcacaatcacaaactcaactagtgccatgtcttgtgtcattccagccatgtttcttctgaaatgtcataggtgaactgttttccagtgaaattggctgtgtccgtctggcatgatcagtgacctcagaggggtattctgcagcagtactgcttctcccttaccctccctgtagagtaaccccgaggttttagtagctaagccatactgcatttgtgaattcatcctttgtggctgtggccaacatagaaatgctgtccccaaagccacagacataaacgcctatagaaaaacagtatgatgggttgaatttttgtatatccctttgtccaccccagttccccaaaggtcaggttggtcttagtccaaacctggtgatgtgggcctaaactatattcaaccctggcccactactctgacctgatgtggtctgggtggacagtagctgcaggtggcaaagatggttccagccatttagatttcccagaaaacaaacataacctagtaaaactccagctcccacccagtctctaagaatcaaaaaaccaggagtgatctgggtatggatacccacattccgattgaaaacctaccccagcagggctgttccaagccatgccacacccttaggagtaggctggggccacaccagttgtctgcaacccaaggtttacagccaggggcacacaacttggagggaagagcagccctttcttttcttcattgtggttttccataggccctctctgtccttctccgttttgattcattgaccctaagagtagcattactttcatatgcagcattaggtgaatgtcaagcatttccagagacctccctaagaagttgttgttagcattcttctgaagaagctgtagaaatgaagtagcagagactttagactagtgacaaaagcaactacctaacaaaagttaggtattgactgactgaagggctaggccatagcccaaaatattactttcctggggcagtggttctttaacattaaacattcagctcaagcaagcagtaacccaaatttttctcacgtttgtcagttgtttgataaaatgacttaacagactcagacctaatggactgtggttctcctcattaatgctatgatctcatttgccctgggatatgccaccatcagcagagaaaccatgcgttaactcttgaaatgccaaaatgagtaggcattaaataccttgccctatctgaccacactatttaatgtttttatcttaaatttaaaaaactgaaatctgaaactgtatgatagtcagtaggcctaaaactcccccttgactttgagaatttgaagggattcccttccatcctgaagtctactttcttgtcatttaagggtgagagaagggaagcttctgtgcctttctagaaattaacaaagaacctgttgggtcctagaccagaaatccagcacgttatcctagcatgaaactcccttttaaaaagtgaacacccaaagagatgttacaaatgaagatatagccccttcagcatctctggagaccaataccacaataaggaataataacaacctaggaataaaggcaggagtttttacataggatgcacgatatccaaagggactttataaacacaagccattgagtcttaagacctgacacatggcaaggataggacatgtgagagaaaatggatggacggttgaagaaaagaggggaaaagaccatgcagttgaactaacttctttttaatttcaaacaggtattttttgcatccgtgcgatctggaggaagtagccaagtgtttttcatgaccctcaacagaaattccatgatgaactggtaacagaagagcacttggcacttatcttcatggcgttatttctaatttaaaagaacataactcatgtggacttatgccagtctagaggcagaatcagaaggcttggttgaacatatcgctttccctttttcctctccctccgcccctcccagtacagtccatctttcaatgttgcagcctggttgagaaggagagaaaaaggtggcaggaatttccaggagatccccaagaatgctgccttgtctgtggacaaagatggaccatgtgcccttcggaattagggatagaaacaaatattgtgtgctcttaacgattaagctgtgttatggtgggttttcaggtttttaccttttttctttacccctttactctgcaagaatggggaaagaatgcatactgcgaaaatgagtcttttaaattctgtctgcctactagttttaagtatatggtatgttgtaaaatttccaatgatgagagacagcacaataaatgtaccttatctccttaggctgaaggccataactacatagtggagtaatttaagaactctcttgccttcaccaacccaaaaggttgctttttgatagcaactggctaatgaatttttaaaaagagaagaaaaatactagttttcccctcttttgggaaatagattttaaatggctaaactactagccttaaaactactagtctaataaaatcaactaccacttttgtgaatctgacaggccacatttttatatggccctttacagaatggagtgtgttgaacaggatactaacgccattgagttgagctggcctagcgatggagggacactctaacacaactttccctcagctattatgcaacagatcagggaaaaagatgggatgacagatggggtcagacagaaagagcttctgggaaacaagcttacatagtcttttttaaaatgcacaaagcctcccagctaagaggtcacttggtttgggcttcattaggactgagactttgttgagttctttctgggacttggagagtggatgatattcaggctctgaacattcccagcgctctcccgagggtgccactttctcaagatgaaaactgtgactgaaaaaattaataataaatgtttctgagctgcctgtgttctccctgtgtgggtgagagaagggactagactcctaagcctgcctcagatacaagaggcatcattggctccaattttagagaacttgaaagcaaggctttggacaaaattttgagaccctaatcactttaccttcctccaaattacccaacatacggtaaacaacatttgtgcagaagtatgtatgtatttagttcaggttgacttgtgtccttataaactcttactcaaatgatttgaacttttatgcgactgggattttttttttccaaagctacaagcatggccgcctgtggtatcgaggtgttgcaaacaatatctgtgttgcgcttcctgttttaacctacctcgttttgtttgtttttgtttcactgttcatcacagcagtgttatctccaggagacatatagagagctcaaccggcaatctcaggtgcatttaacatttttaaaacgaaacagtagttgaccaaatttttcttcttaaaaaattggaagtggggggaatccaatgacaaaaactaatgtggcttgtttctggagaaaataattactgtaaatggaacaacaacaacaaaaaaaactacgatcttactgactttgcctaaatacacaagcagctgatgtactattaatgagaacgaaatacacattaggaaaatggagccatttcaatctagtggtttgggcaagatggggaagagaaggggaaacattctagtttctggattacattattatgcccctcctgaaaaggtggttgtcatttgcatttatttaaagcaggtaatatgcaggaatgtaactgaggattatcttcaggcaatcagcaagatatcctcctcatggtccctttagctctcaaaagcaatgaaatcctcctgttctcatttttactgctgtggttgtgctgctgaacaatactatcttctcaaattccatgccacaaattcagcaataactttttggattgaatttaacaactactgtaattggatgctgatgtggacaaaatatattgatttcgatttcactcccgaatgtgattgccaccagctctttatattgctgctgtggtattttaaaccagaagcttctttaaattatgttgcaaactgatctttgtttttatgttttgttttgtttttatttctaagtgataagtttgaaacacacagctttaaatgatttttttattgtgggattttgggtacagttaagaaataaaagggaatcattgtgtttaaacataaggtagtttgtgaatgtattttttaaaatctagagtcattgaaacaaatcataagaaaacaatattaatgcagtcttgtttacagtatgtacagtgacataacatagaacatgagcttttctggtgccaacaacaataaaacacacgttaaacatcaagccatgccttttatatttttgtactaatattttacactgagtacaaggcaaatccaaatttaaatgggccccccagaaatctgtgctctttaaaagacagatatttaaagaattcactgaagcttttatcttcaaaaataaattttcctccagcaagacagaccccagccctgacataaggaggcctagaacatgcagaatacgtcagaatggtgtccttgtggctcatccaaactttctgaattgccttaattctttttgggggtaggggaggaacggttgcttttcatccatttttatagcatctcaacaaaaaaaatcttcagttctgatctttttataggtgattttgtctctagaaattggctcattttatttttattttcctacaaagagaaactggagaaactgagccctcccctcagagtaagtttcactagatctgccagttcttactgctctaaattaataatcatccagtaaaatctactgagcctgcccacaccatagtctgggtctggggtctggcaggtgaccatcattcctgggtgccagtcaaagatactgtagcatggattcctgcatccagtggtggtaggaatggatgaccagtgaagttccttcaaataatgaggctcttccccctgccagttccagccagaccactgtcataacacacaatgcaaatgaagacagccttcactaagttccacataaaattgaacagctctattttagatagatctcattatttttcttggagacttctaaacaatccttcaagaagacctagaactattatttttattaaacagggtatattaagttatgggtgaaatctcacaaggtcacctggacaggggctccatttttctaacactttgacattgttttctagggtgcactcctaatatactttgcatcaagtacatgttttttaaaaacaccttagttcctggttgtcaaaacctactaacaatttttgtctgttcttgtgactcattggtaattggtgtctctggtccctcctgtccagtagattattagaaagatgtgaaattccagccagaaccattttggttttatccactgccaggaaaggaaggggctaaagtctcacattccacgaagcttttaaaaaaatgctttccctactactatgtgtaccagttcccgtcactgtattcttgaaacgtggaagagctctttgtgttaacagtgtgtgctgtctttgaaagtctgcttgaacaggcatcacttgcatttgtgctgattgctttaagatgtaagatgtgctacattatttttaagaaaaaaaatagttattgataaaacttttaattttaacctactgcaggaaaacatgagaaaatccacagcatgctgataacaattctgaatgatgctactatgctctttatattccagaatcaccactggtaccatgttctgatcatttcaacagtctctaacttgttagttaccttttagttcattcttcaaaatttaaatctaaccaaatcaagcaaaacataaccaaccaaccaaaaactgacctcccctgagactacatagttgtaacataaatctaaaatccaaaagtctaaatttgatttaatttacctgctaatatttctcataaatgccactatatctccttggtcactatatatcaggaaccctaaagtaagctgtcctttcatggatcttaaataaattgggtgtaaaattgatcacttttcaggagtcccagcaaagaagaaaacctcttgagaatttgcaagttcaaaactgacaatttgtatattcctaccaaacattttctaggttgtttttatttctacaccattattctgggaattcttccattgataactagaatattcaacagtttgcttagcattaaacagtgtgagatcataaccctgtgctttggactttattcttctagacctgccattccaggaagtgccagaatataccaaaataaaaatccccataaaagcatttttaaacaaaaatccctgggtaatgtttgagttattttaaatctagatcaaaatcttggattcttctgagtccatgatgacaaatgtttggatgaaaagtagaaaatacagttaaaaataaaaatgtcctaaagtttacagatttttgagtttgtgtacatatcttcaaactcactccttgcatgatagggtttggttttaatggtttatttttatcagcaccaagttgcattgcactattgaggctgagcaaatgctggtggaaaggtgagttttcatttctggcaatggatcattatttgtacactgtaaatatcatgcccagctacccctttcccttatctcttcccctgggataaatgttaaggaatagtaatacttattatggtatgtttaagaaaccttggacattaccctgaatcaaaacttcaaatgttaggtggcagcaggaaacaaaagattacagcttgaatgaaattttaaaattgaatgttgtaaaactatttttgaacgttttagctgccttatttatgttaatataactgtagagagatgccaaatgtataatatcagaagggaaaactacgattttgctgtgcctacaattgtttacattttttaaatctccagttttcaaaagtattttaaattgtcaaacatttgctaaaactggattataacctcacctgagaatgagagaagaaaatcttcctggcatattttccagtctgaaacttttggttactttcaggtattttttttcttgcatacaaaaatcattgagaaagtactttctacagttattctaagcagtcattaaaaatgctttgataggtttccccacatggtaactaccatgtcctggaatataatatgctatctttgtcaaaatatgaataataaaacattaatcgta

SEQ ID NO: 5 - DNA, 82402 bp, Homo sapiens
  source 1..82402: mol_type = other DNA
ggagacagatctgactggccaacgtcgggcggaagtcgggaggttgggtggtctgtaaacgctggcttgtgacagggagggggaggaggaaggccttcgtaaaggttgcatctccgtcccttcgctcccggggacccgcgggaaaaaaaaaaatccaacacccaggccccgcggctagccccttcccacaggctctctccgctcgattttgtcaccgttatgtgggaagcgaatccagtgagtagccgggcgggacggggcgggcccagggggcggggttgatgagagaggggcgggagggggtcaccggaactgcttccccgcgctcgcttcagtctgggtgttgagttccgggaccggagttcccgggccttttggcttctgtagtctgtacctttttaagcagtggaagtgcctgggtggattctccaatgctttattgttttcttgttacaattatttattttacttcccgtgatgtttcagcctcatcccttcaccatttgttgttgttgttgtttttgagacggagtctcgcactgttgtccaggctggagtgcagtggcgtgatctcggcccaccgcaacctccgtctcccgggttaaagcgattgtcgtgcctcagcctcccgactgccttcactgttttttgaaactttgtgttttgctttctaattggagtaactggccttggaacctgtagtcagtcatttgcctcaggtttacctgccagtcccaccagtctaaagcaagggaattgggacccccttgtcttgaatgggcctaagaggagccatcagttctccttttcccttcttggtggacagtcgtttaaaacttggagtatggactgtatgttcttagatgttttcgttcggtggacaaagtgatctggagcatttcaactgcaagtctgccttcttccttggctgactctggtattttcattatgacttcatgtgtctttgtctactttgcttttatacatttatttatttaaagtgcaacgtaggggccgaaaactttagtacctttcctcaccacccattgtaaggatcacagccaccactccttaaaacagaagataggttaacaaggtaaaagcagagcaaatctaatcaaagttttacaccaccaggcacttcagagaccagggagatctctatttttatgcgtaggacccatgaagaatagacaactgtgtaaaaatgtgactggacaaaggatatactctaatgttaataaactgaggaaggaagcccagcaaggtctgtttgttcagattcttcttggcctctctgtgtatcatttcttcctcctacggaggaggaaggtcccttctggaatgagggtcttagcgacctactatcaggcaaggtagattagagaatttctttatggccagttcctatagacaatggcagggaaagcttaatagttccagtttttatggcttgctttgtaggagagggatcctagtttctatcactcaccttggggaagaattctggtttctgtgactcacttctgggacgaaagatgggcaggagacagaagggcaggagatcagagggagagactgcttccgaggctgcttctgaggccttccaatctcttttagttcaaagtattcagcatgccaaagtgtcatacttcggggtagtattttctgagccccaacacaaccctcagagagtgggatctatttgccaagagtattcttctgttgttatggttgaaactgcctggtaaggtggcagatgtatggtatttaaaacttaggagttgactggaaaaatggtagaatcacatttcagcaagttgttggactaaatacagtcgtgcgcctcctaacaatggggatatgttctgagaagttcattgctgggtgatttttttcattgtgccaacgtcatagagtgtactttcataagcctgctacacacctaaggctatatggaatagcctattgctcttaacctagaaatctgtacagcatagtattgtactgaatactgtaggcattcgtaacacaatggaaagtatttatgtatctaaacatagaaaagatacagtaaaataaagtgttaacaatctttgggaccacttgtatatgcgatccatggttgactgaaagcttttatgcaatgcataattgtgtatgaaacataagaaactactcctatgctgagataactgcataaatttactttaataacccctaatttccatatttgcaataatttcctataatcagtattcttcccctctcatttctggaatatatttccagataagttagaaagtttatcagtacatttccctatgtttttaagttaagtttttatccagtagaaactagtctgttggtctggatttggtagttgcacattatggttccttcttgtgcatcatataacaatagtcatcatcttagtattttcgattcatacgtataatactctcttcaagctgcattagaggaaagtaattacttgtatttgattttagcaaaaataatttagaataatgagaatgtgctctctgcttatatattcagtttcactatctgtcatcaacaaccttcattttgtatttatatctttatgtagctattattccctttttgttatcagtccttcttaatttttccataacaaaccctttagccacccaagtatatgtcttactcaaggttttaaatctttcactatattgtaagatccacaaggacaggggtttttctctgttatttttcctatagtatcttcaactagagaacagaacctgacacatagtaggcactcaataaatatttgttgaattcatgatggtggttgtaccagcaaggactaaagataattctttgctcctactatgaattttccctcctgcgtcacacatacatcagaatttgctgttggattatttgtgtgtttgtgagaattataaaggcattaatgaatgtcttatatacttgatttgttatatcattatctcatttctttgtaagcaatgggttttctttgaaatcacctgtgtgattttgctaatttcagcagagcaggctgacttttgttaaaagtggggaatcctccacagatcatctcacattcttcttttgccacccaaataagacatatttgtcttactgctactgtattttattactactaatagtttttcttcctataagcatatgaatgatatcagtaagcgcaatttggttttaaaaatcaacattctacgtgtgggtttctctagtaatttgttagtttattttagtttcgctttcctggtttcacttaccacaatttcacttaccagaagtcagctgcggtctgaaaatatgaaatggaaaattccagaaatgaacaattaataacttttaagttgcatactgtactgtgtagtgtgataaaatctcatgccattgtgctccatcctgcctggggccacgaatcatccctttgtccagcatatccacactgcatatactctacctgcctgctggtcatataataacatgtaatgtcactcacttatttattgagcacctgttataagctagttagtgcgaagtcccagggtttacagtggtgaacagaacagactaggctccagcctttatgggtttgcagtctggtgcaggcaggcagatattaaacaaataattatgcaaatacatttaatttaaattgtgataaaaagatatgaaagaaaaagagtactatgacagtgtagggggagctaatactagactgggcaatcaggaaaggccaccctgtgaaagtaacttttatagagatctgaaggattgagcaagcgttagccaggtaaaggttggctggaaggtggggagagctgttcagacagcagagatagtgtgagcaaagatcctgagaaagaaaggagcttggtgcttgagaaaaagagagaagcctatgtggctgggacacagtgcaccagaagacaagcccaggaggtaggaaccaggccatgcatggatttgaggcacatgtttaggattttgaactttatccttagaggagtggtaacacattgaaggaagtgtcatgaacatatttatgtttttaaaaagattactctggctgatgtgtggaaaatgagtttatgtattagaaaatatggtagacgtaataatggcctcctaaagatatccacatattaatacccagaatctgtaaatatgttgttacatggcaaaagggaggtaattagctaatcagctgaccttaagataaagagattaccttggattatccaggggggccccaaagtaatcgcaagggtccttaaaagtagaacatggggacaaaagacatggagtgactatggaagaatggtcaaagagatacaacatggctgactttggagatgaaggaaggaggtcacaagccaaggtatgtgggtagcttctagaagcttgaaaaaccacggaaatagattctctcatacaacctttagaagggaatcaaactcaccttgattttagcccattgagatgcatgtaagatttcttcagaaatgtaagaaaataaattagtgttgtttttaagccactgcgtttgtggtaatttgttctagcagcaaaagaaaatactgagggggataaggggctgtaggaagactaattaggaggttatagtgtagtccagggtagagacgaaggtgacttggactatgtggggaaagtatgaagtcacctatgaaggtgactactaagtggggagagaggagatcaattcaagctgcatcttagatgatgacttagctttctggcatgggcagccaggaataagatgttttcactgagccatatggaagataacaggagtttggttctggactcactatgtttaatgtgcctatgaagcatcaggtagtaaagtttggaaggcagttggttagggaggtaagtctggagctcagagaagaaggctgggctggaaattgaaatttgagcctcagtgtctataggtagtctgtcacccaagctggagtgcagtggcatgatctcggctaactgcaacctctgcctcctgggttcaagtgattcttgtgcctcagcctcctgagtagctagaactacacatgtgcaccactacacctggctaatttttgtattttagtagagacagggtttcactgtgttggccaggctggtcttaagctcctggactcaagtgatccacccgcctaggcctcccaaagtggtgggattacagtcgtgaaccaccgtgcctggcccccaataaaacagtattttagaaattaatgtttttattatcattgagaaggatgattttttttttgcagcttcttacaaagtacttatatctaatttgataatagtttgagatgtaggttagaccacattttgattactctgtatgtctactaaattaggaaatgttgtgccacaattatagattgtcaggaattgcaacttgtgtttgctggcgctgtcagatgtttaggaatatcaaggtcaaatacagactgaaaaattatcggaagatttctccctgaagattatatcttgtgctctttcagttgcgttattgagaagcctgtaatattagggtgaatgtttcaaccagcctgaatgtttggaagatagtaacaaatggattcttaagtcattttttgacttcttcagtatctggaaagtattttcccatgttttgttttaacatttagtcatgttctttatacacacaatagtgtaatcagtctcactctaagaagtgaagaaaaccatcaggttttgggaaggaatcacatcctagcaattgagccatttgcaacatagcttggtgactttgaaaaatatggtattttattctcagcattaaaaatcagggtattttggccctgaagtagtaggttcacgctatttaaaattctagatatatctctgctatactccacttaagcaggcctctagaaaacatagaattactttttggtattgtcagcattatgaagaatttttttgttttttaaaatctcatccctcatttcagaaacttgtcagcaccttttttccttgacagccagcaaacttgcgtgggaagaataatcttgcaaacgctgccatttccttctgcaacatctgagagcgcatactctgaatagtcaatatttgatgatgtttaatttccattatttccttcaacactcagttataatcaggaggcatattgttgactcctgtttcatataaagaatcttttagtaacataacagtgtatgtttttgctatttgtatacttcatgctctgtcaattttgaatgtgtggcacctttttcaacttatgtcatagctcacaaaagtatcattgtctaaataaaaactgtcttccctgtactataagttttcactgatatgtagaacaaaaagttgttgagtacttttaccttatatactgtatatgtgtcaaggactgatttatattttctccacaggtagtttgtccaattgtaaaacaaaatatatgctaaagcactcaacatgacagtaattgctcttctatattgtgttgcatgataatatagcatgataatatatgacatccagtagaatcatttaataaagaattttggtcaatagcttgtttcttctcaggcattaaatttgaattgactagcttctcagcagtatcaagaatttttacctgttttagctgaggaatgcgtcttttctcttggtttcttctttgtccttattaacaaagcaaatggactttgtgctttgtgtgaaaaataatctgaaagtttacttgagttttatagtactatatttaagtaaatgctaactatggctgatatgaatgtatcaacagagagtgaatataatgggatattatagtgaatggtaactttaaagaaaataaagtgattttcgtacaaattattaatcttacatttcaacttttcaaaatgtatgtagacaaatttatttcattactttgcccctgaaaatgcctgtgaaatatctcataatccctgaggaccgtcttttgaagattctgagagaaaacaagaagggctaggactgagccatgagaaactctaaaagttacaagctgaggagaagtcaaagtgcaaaggagactgagaatttatggacaaaaaaataagatgatctggagagtgtcatgtcatagaaaccaagagaagagttattcaggacagaggataaactgtgaaatgttaccgtgagataagtaagatgaggactgaaaagagcataggatttagtaatgtgaagctcattagacatcctaggaagtgtcttttgtttgtttgtttgtttttaagtgatgatgggtaggaaagattggatcagaagctagaaaagttaaattggagtgggtgttagcatagaaactgaagaaataaacatagtgtgtagacaaagagttacagttaataagccaccaaaggagacaagatgaaatcctaaaagcactcaatctgaaagaagatagaaaaaaaagagaacaaagaacaggtgggaccaaaaaaaaaaaagcaaataacaagacgtaaacttaaagctaaccatatcaataatcatactacatgtaaatggatcaaacaccccaattaaaatacagagattttcagattggattaaaaaaacaagacccaagtataagttgtctgtaagaaatacaatttgaatataaagacatgaatagaataaaactaaatagagaaagatacacagtgctaacactaatgaagagaaagtgtgagtggtttattgttgttaaggtagatttcagagataatgatattatcaaggataaagaatgtcatttcttaatgataaagagatcagttaaccagaaacaatcctagatattttagacatccaatattagagctttaaaatacatgaaacaaaattaatagaatagcaataagaaatagaaagatacccagttaactggagatttcagtagttttctccaaataattgatggaatgagcagatagaaaatgagcaacagtataacaaacttgaacaccactgtcaactaacttgatctgcttggcatttatggaacaattcacccatcaacagctgaatacatgggttttatttttttccaactacatagagaacgtgtaaaaatatatgccatattctggcccataaaacatatctcagtacatttgaaagaattgaagtcaagcaagatgtactttctgacctaaatggaattaagttagaaaccagtaacagaaagattgtaaaattcccaaacatttggtaaataaataacactttaaggtaacccatggattaaagaaatgaaaagagaaaatagaaagtatgaaaacaacatatcaaatttgtaggatggtgccaaagcagtacttagagggaaatttgtagctaaattaatggctgtattggaaaagaagaaatgttacaaatcaataatcacagctttctaagaaactggaaaaagaagaagttaaacaggagcaaggaaataaaggttagagtggaaatcactacaacagaaaacaacagtgaagatcaatgatactgaaagctagttctttgagaacatcaagactattaataaatttctagcccagcagatcaggagaaaaagaagacacaaattaccaatattaagaatgagagaggtaacatcactacatattctaaagacattaaaaggataataaaggaatgttatgaacaactttatatcaagcagtatgacaacttagatcaaatagacatattcctagagagatacaaactgctaaagctcactgaagaaacagataacacaaatagtccaacatctgttaaataatttgaatttgcagaaaaaaatcattctaaaagaaaattctaggtccagatggtttcagtggtgaattctaccaaatatttaaggaagaaataatactaattaacacagttttagaaaatggaagaggaggtaatacttcacaactcatttcataaggctgtcagacccttatttcaaaacccatcatagaaaactacagaccaatatcctgcatgaacatacatgcacaattttaaacagaattttagcaactcaaatctaacatatataaaaggattaatacatcatgacctactgatgtttattccaagaatgcaaggtttaatatttgaacagccatcaatgtaattcaccaggtaaacaaactaaaatgaaaaactatgtggtgattccagtacatgcagaaaaagcctttgacaaaatcgaatatcgattcctgattaaaattctcagcagcctaggaatagaaaggaacttgctcaacctgatggacggtatgtggaagggggttaacgcaacaggctggggttgttgaaaccttgcccattcttaagcttgtttccatgactgtcctttgctcacctccagggaactaagctcttgaaattttttgtcttaatagtgtatttgcatgcccgagtctttgagccgtgctataccagtttgtccagattgtttatactagcaatgcagtttacggtgaagacctgccttccctctgggaatctggagcttcagtaacaggtcagtcacacaggtgctgttatgtttacatgactgatacccagtaaaagccctgtacactttggctcaaatgaacttccttggttggtaacactttgcacatattgtcacacatagttgggagaatgaagtgtgtcccatgtgactgcaccgggaagggacgcttggaaccttgtatgtggtttcttctagacttcaccccatgtgcgtttcccctttgctgattttactctatgttctttcactgtaataaagtgtaaccatgagtagagcaacttttgagtcttgtgagtcctaggaaatcatcaaccctgagggttgtcttagggacccctgacacaaagggcatcttcagaatgcctttatctaacaacttaatggtgaaagactgactactttctccctaagatcaagaacaaggcaatgatgtccattctttattcagtattctactagaggttctaaggaaaaaggcaagaaaggaaaaaagaggcatctaaatcttagaagcaagaagtaaagctgtctttattcagatgacatgatgcctatgtaaaaatctaatggaatctttaaaaagctcttagaactaataaatgagtttcataaggttgctagatatggaattcatatacaaaaatcaatgtatctctatacagtagcaacatataatcagaaattgacttttaaaatgcaattccacttacagtactatcaaaaatatgaaataagcctgaaagtagcataaaagatttgcaagatctgtacattgaaacctacaaaacattcttgaaaaaattaagacctaaataagtcgaaagatataatttattcatgggttggaatactcaatattgttaagatgccaattttctccagacagattgataattcaatgcaatcccaggaaaagaaatcaaaggaactagaatagccaaagcaattctgaaaaagaagaacaagtttggagagcaaatgctacctgatttaatgattcaatgtgaagcaacaataatcaaaacagtgtagtattggcatcaagttagggaagttaattaatggaatggaatagaataaaaaatagggccacaaacaaatgattttttaaaaggtacgattcagtgggaaaaggacagttgttttaactaatgatgctgaaacaattggatacccatatgcagaaaaatgaacgtcactccatactttgctatactataaaaattatatatatagtatataaaatatactaataaaatatatagtatagaaaaatttataaactataaaatttactaaaaatggatcatagacctaaatgcagaatctaagactacaaatttccaggtgaaaaaaatagaaaaaaaaatacatatatttatttttttgagacagagtcatgcttggttgcctaggctgtagtgcagtggtgtgatcatagctcattgtaacattgaactcctgggctcaagcaatcctcttgcctgtctcccaagtagctgggactacaggtgcatgctaccatgcccagctaatttttaaattttttgtagagatggggttttgctatgttccccaggctagtctcaaactactgacttcaagtgatctagtctaaaactcctggtctcaatcttctgggtgcagcctcccaaagtgctgtgattacagggatgagccactatgcctggctgagaaaaatctttttcaaatcttaaaatttgtatttctctaatgactaatcatgttgaacatcttttcatgtattttccatctgcttgtttttttggtgtggtttctgccagcattggttaggtacggagtctcgctccatcaaccaggttggagtgcagtggtgctatctcatcctactgcaagctctgcctcctgggttcacgccattctcctgtctcagcctcccgagtagctgggactataggcaccctccaccacgcctggctaatttttttgtatttttggtagagacggggtttcaccgtgttagccaggatggtctcaatctcctgacctcgtgatccgcccgcctcggcctcccaaagtactgggattacaggcgtgagccaccacgcctggccacaaagattctttttagctacaatgccaggactatgatcgatgaaaaaaaaaagtgataaaacagactttatcaaaattaaaaacttctgctgttgaaaacatgcttctaggagaatgaaaagataagccacagacgggagaaagtatttaaaaagcatatatctgataaatgacttgtacatagaatatattaagaactctgaaatctcaagagaaggaactcaattttttaaagtgagctaaagatatgaatagacactgcaccaaagaagataagcagatggaaaataacaacatgaaaagatgttcaacatcattattctttagggaaatggaaaatagaaccacaatactgcccatctatcagattggcaaatattaagaaaagccttaatgccatttatgaggactttgccttcatgatctaatcacctcccaaaggccccattttcatatcacattaggagttagaatttcaacataataatttggcaaggacacaaacgtttagtctataacattctggccctggcccttccctccacgaaaaatttgtgtcttcgttgcatgcaaattacattcattttatcccaatcaccccagagtcttaactgataccagcatcaactttaaagtccaacatctcatctaaatattatctaaatcagatgcagttgagcccaaggtatgattcatcctgaggcaaattctcctccagctgtgaccctgtgaaaccaaatatgtgcttccaaaatgcaatggtggtctgagtttggtggcttgtgcctgtaatcccagctacctggcaggctgaggtgggaggatcacttgaggccaggagttgaagaccagcctgagcaacatggcaagactgtctctgaaaaaattgaaaaattaattggccagacgtggtgtcatgtgcttgtagtcccagctcctcaggaagctgaagcacaaggatcacttgatactaggagttcgaggttgcagtgagctatgatgtgtcactgcactttagcctggacaagactaaagtgcaagacaacagagcaagaccctgtctctaaaaaaattaaaaagttaaaaaatatagtggtgtgctagtcatagggtagacattccattctgaaagggagaaaaaggaaggaagaaaggggtgacaggtcccgagcaagttccatgaaatcttaaggctacaaaatgaatgattggcttgatgctctgccttccagagaagtggaagtgctgccttctggaccctctgatggggttggtcacaatccctgggctttgagaggtccagccctcatgagccatctggcctattgaaagcaaggcagtggtcccttcttttgttgaaccaaggaagcatcccggatgatctctgaattgcttttagggtccttccttgtcttaaagaagagcacacatttgcagctgaattgctctatggtcccatcctgaaaaatccaagaagtctaccaaccctccttcatttcttcccatctactattttttcatttcaaattggcagttgtcctgctggggcggtccacatccatactaatcttatcaaatgatcatttgaccacaaccttagtgttgtcctctgaacagactttctcattcttttcaatatgggtaggttgagaattttctgcatctttaagtactggttcttttttgcttaataattctgtctttaagtcattctctcttcttgcgttctatttaagcagtcaggaggacccaggccactccttcagcaaattgtttagaggtttcctcagccaaatatccaatttcatcacttgcaaatgcatgttatctttataactgttacatctttatgttggagtaacccttttatcatgataaaatgaccctactttttatagtaacactttttggtttgaagtctattttgcctggcattagtatagccactccagcttttttatgactgttgtttgcatggtattttttatttatccttctactttccacctatttgtatctttgaatctaaagtgtatttctgtggacagcatatagctggatttcaaaaaaatctaatctgaaaaatctacgttttgattggattagtttactcacatttaatactattatttaattgcatgttatattattatttacatctgccttttttttttttttttttagcagagtctcactctgtcacccaggctggagggcagtggtgcaatctcagctcactgcaacctctgcctcctggttcaagtgattcccctgcctcagcctcccaagtagctgggactacaggcgtgtgccaccacgcctggctaattttttgtattttagtagagacagggtttcaccgtgttggtcaagttggtctcgatctcctgaccttgtgatccactcgcctcggcctcgcaaagtgctaggattacagacgtgagccactgcaccggcctacatctgccattttactttttgttttctatttaattattttcaaatgttggaatattcacatctatataataatgtatcttggagatagtacccaagtctaaacatgaatttatttgtttcatatatgccttttacacacagttcaaaggtaattttatataatatttttcttttttttttttttgagatggagtcttgctctgtcgcccaggctcgagtgcaatgacatgatctcggctcactgtgaccccccacctcctgggttcaaatgatcctcctgcctcagcctcccaagtaactgggattacaggcgcctaccaccacacctggctaatttttgtatttttttttttaaatagagatggagtttcaccatgttggccaggctggtcttgaactcctgacctcaagtgatccacacacctgggcctcccagggtgctgggattacaggcgtgagccaccgcacccagcctgaatattcatacataaattcttaacagtaaaaggtatgacatacatttaatacagtgaaaaaataatgtgttcaggataactaagcagtgcaatagcatcaccaaaatacctttatcagatgttaaacaacagcaacagcaaacagtggcaagctttgtctccacctatgatgctgtgttttgattaaaatgctcctatacactgtattttttgactttaggtaaaacatcagaagcgattgagggaccaagtagtggctcctataggggcgaggaagcattttgctggatggcttttaaaaatgtttcctttagagtcatctaccttattaacaatggtttttgtcttagaaatctttctttgatgttataaattgacatgaattcttgtttggtatgaatgcacactgctccagacctttagtaatctcatcacatgttttcatcatgttgtctacagccactttctctgcatggttaatgttatctttatcactgttatcaaatcaccttgattcagaaccattttaattattttaccattgatactgaatgaacaactggagcctcattatcaatattagaaacatctttgatattcacttcttccagcttactgatagactctggaggtacattttttgcatatgtcaggaggttatatatcttttttgttttcccttggatgatatacagagtccttcgaaatcaccaattgttcatcatcaacactgaacatagtcttaggccaggttgtgtcaggcacgactatgtcttcagtcattgttttccgagtgttggcaactgcatttgtggcatcctccatgctaaactacttttgaaaactttctacacccttatctctgttcactgttgctagcatgctattcaagaatatatttttatatttaccctttattgatctaaggatatcctggtcacatgccttaattaatgaagtcacatttcggggaaagtacatgttataaacattattttttatgggaatttcagctggaggatgagcagaacagttgtcaaggaataacaaaatcttacagtctagcttcactgcagtaagcatgagccgctagtacaaaatgtttgtgaaactagtcagaaaagaggtttctggtgatacatgccttttcttttccttttttttttttagcataataatggactggtaagaaatttactccttgaatacagtgaggacgtgaggttttccctgtcaaagcaagtttacacttatatgtgtattagcacatcccagcacagttattctgtctttggcatccttaattcctgtaaaggctgtctcagcagctgtaattggtgtctttctaggataataatgtcaaaacagtgatgtttcattggcattatagacttgttctagtgtcagatgtttatcagcaatgaccttggcaaactcatcaatgaatttctctgttgcttcatgatcaccgtgttttatccctacatgtctttaaaaatttaatgctgtatcttttttttattattattattatactttaagttccagggtacatgtgcacaacgtacaggtttgtttcatatgtatacatgtgccatgttggtttgctgcccccattaactcgtcatttacattaggtatttctcctaatgctatccttcccccagccccccaccccccgacaggccctggtgtgtgatgttccctgccctgtgtccaggtgttttcattgttcaatcccacttatgagtgagaacgtgcggtgtttggttttctgtccttgcaatagtttgctcagaatgatggtttccagcttcatccatatccctgcaaaggacttgaactcatccttttttatggctgcatagtattccgtggtgtatgtgtgccacattttcttaatccagtctatcattgatggacatttgggttggttccaagtctttgctattgtgaatagtgccacagtaaacgtatgtgtgcatgtgtctttatagtagcatgatttataatcctttgggtatatacccagtaatgaaatcactgggtcaaatagtatttctagttctagatccttgaggaatcaccacagtgtcttccatcttccacaatggttgaactagtttacactcccaccaatagtgtaaaagtgttcctgtttctccacatcctctccagcacctgttgtttcctgactttttaatgattgccattctaactggtgtgagatggtatctcattgtggttttgttttggatttctctgatgaccagtgatgatgagcattttttcatgtgtctattggctgcataaatgtctccttttgaaaagtgtctattcatatcctttgcccacttttggatggggttgtttgatttttttcttgtaaatttgtttgagttctttgtagattctggatattcaccctttgtcagatgggtagattgcaaaaattttttcccattctgtaggttgcctgttcactctgatggtagtttcttgtgctgtgcagaaactctttaattagatcccatttgtctattttggcttttgttgccactgcttttggtgttttagtcatgaagtccttgcccatgcctatgtcctgaatggtattacctaggttttcttctagagtttttatggttttaggtctaacatttaagtcttgaatccatcttgaaaattaatttttatataaggtgtaaggaagggatccagtttcagctttctagccagttttcccagcaccatttattaaatagggaatcctttccccatttcttgtttttgtcaggtttgtcaaagatcaggtggttgtagatgtgtggtgttatttctgaggcctctgttctgttccgttccattggtctatatctctgttttggtaccagtaccatgctgttttggttactgtagccttttagtatagtttgaaatcaggtagcatgatgcctctagctttgttcctttttgcttaggattgtcttggcaatgtgggctcttttttggttccatatgaactttaaagtagttttttccaattctgtgaagaatgtcattggtagcttgatggggatggcattgaatctataaattaccttgggcagtatggccattttcacgatattgattcttcctatccatgagcatggaatgttcttccattcgtttgtgtcctcttttatttcgttgagcagtgctttgtagttctccttgaagaggtccttcacatcccttgtaagttggattcctaggtattttattctctttgtagcaattgtgaatgggagttcactcatgatttggctctctgttattggtgtgtaggaatgcttgtgatttttgcacattgattttgtatcctgagactttgctgaagttgcttatcagcttaaggagattttgggctgagacgatgggattttctaaatgtacaatcatgtcatctgcaaacagggacaatttgacttcctcttttcctaattggataccctttatttttttctcttgcctgattgccctggccagaactttcaacactatgttgaataggagtggtgagagagggcatccctgtgttgtgccagttttcaaagggaatgcttccagtttttgctcattcagtttgatattggctgtgggtttgtgataaatagctcttattattttgagttatgttccatcaatacctagtttattgagagtttttagcatgaagcgttgttgaattttgttgaaggccttttctgcatctattgagataatcatgtggtttttgtgtttggttctgtttatgtgatggattacgtttattgatttgcatatgttgaaccagccttgcatcccagggatgaagccaacttgatggtggtggataagctttttgatgtgctactggattcggtttgccagtattttattgaggatttttgcgttgatgttcatcagggatattggtctaaaattctctttttttttgttgtttctctgccaggctttggtatcagggtgatgctggcctcataaaatgagttaggggggattccctttttttctgttgattggaatagtttcagaaggaatggtaccagctcctctttgtacctctagtagaattcaggactgtctggtcctggactttttttggttggtaggctattaattattgcctgaatttcagatcctgttactggtctattcagggattcaacctcttcctggtttagtcttgggagggtgtatatgtccaggaatttatctatttcttctagattttctagtttatttgcgtagaggtgttcatagtattctctgatggtagtttgtatttctgtgggatcagtggtgatatcccctttatcattttttattgtgtctatttgattcttctctcttttcttctttgttcgtcttgctagcggtctatcaattttgttgatcttttcaaaaaccagctcctggagtcatttgtttttttgaagagttttttgtgcctctatctccttcggttctgctctgatcttagttatttcttgccttctgctagcttttgaatttgtttgctcttgcttctgtagttcttttaattgtgatgttagggtgtcgattttagatctttcctgctttctcttgtgggcatttagtgctgtaaatttccctctacacactactttaaatgtgtcccagagattctggtacgttgtatctttgttctcattggtttcaaagaacatctttatttctaccttcatttagttatttacctagtagtcatttaggagcagattgttcagtttccatgcagttgtgtggttttgagtgagtttcttaatcctgagttctaatttgattacactgtggtctgagagacagtttgttatgatttctgttcttttacgtttgctgaggaatgctttatttccaactatgtggtcaattttggaataagtacaatgtgatgctgagaagaatgtgtattctgttgatttagggtggagagttctgtagatgtctattaggtctgcttggtgcagagctgagtgcaagtcctggatatccttgttaactttctgtctcgttgatctatctaatattgacagtggggtgttaaagtctcccattgttattgtgtgggaatctaagtctctttgtaggtctctaaggacttgctttatgaatctgggtgctcctatattgggtgcatatatatttaggatagttagctctccttgttgaattgatccctttaccattatgtaatggccatctttgtctcttttgatctttgttggtttaaagtctgttttatcagagactaggattgcaacccctgctcttttttgctttccatttgcttggtagatcttcctccatccctttatttggagcctgtgtgtgtctctgcacgtgagatgggtctcctgaatgcagcacactgatgggtcttgactctttatccaatttgccagtctgtgtcttttaattggggtatttagctcatttatatttaaggttaatattgttatgtgtgaatcggattctgtcattatgatgttagttggttattttgcccattagttgatgcagtttcttcctagcatcgatggtctttacagtttggcatgtttttgcagtggctggtacgggttgttcctttccatgtttagtgcttccttcaggagctcttgtaaggcaggcctggtgatgacaaaaatctctcagcatttgcttatctgtaaaggattttatttctccttcacttatgaagcttagtttggctggatatgaaattctgggttgaaaattcttttctttaagaatgctgaatattggcccccaccctcttctggcttgtagagtttctgccgagagatccactgttagtctgatgggcttccctttgtgggtaacctgacctttctctctggctgcccttaacatttttttccttcatttcaaccttggtgaatctggcaattatgtatcttggggttgctcgtctcaaggagtatctttgtggtgttctctgtatttcctgaatttgaatgttggcctgccttgctaggttggggaagttctcctggataatatcctgaagagtgtttctagcttggttccattcgccccgtcactttcaggtacaccaatcaaacatagatttggtcttttcacatagtcccaaattttttggaggctttgttcatttctttttactcttttttctttaaacttcttgcttcatttcattcatttgatcttcagtcactgataccctttcttccacttgattgaatcagctactgaagcttgtgcatgcgtcacatagttcttgtgccatggttttcagctccatcaggtcatttaaggtcttctcttacactgtttgttctagttagccattcgtctaatcttttttcaaggtttttagcttccttgcgatgggttcaaacatcttcctttagctcggagaagtttgttattaccaaccttctgaagccaacttctgtcaactcgtcaaagtcattctccatccagctttgttccgttgcttgcaaggagctgcgttcctttggaggagaagaggtgctctggtttttagaattttcagcttttctgctctggtttttccccatctttgtggttttatctacctttggtctttgatgacggtgacctatagatggggttttggtgtgaatatcctttttgttggtgttgatgctattcctttctgtttgttagttttccttctaacagtcaggttcctctgctgcacgtctgttggagtttgctggaggtccactccagaacctgtttgcctgggtatcccagcggaggctgcagaacagcaaatattgcagaacagcaaatattgctgcctgatccttcctcaggaagcttcgtctcagaggggcatccgactgtatgaggtgtcagtcggcccctactgggaggtgtctcccagttaagctacacgggggtcagggacccacttgaggaggcagtctgtccattcttggagctcaaacactgtgctgggagaaccactgctctcttctgagctgtcagacacggacatttaagtctgcagaagtttctgctgccttttgttcagctatgccctgcccccagaggtggagtctacagaggtaggcaggcctcattgagttgcggtgggctccacccagttcaagcttcctggccactttgtttacctactcaagcctcagcaatggtggaaacccctccccaagccaggctgctgccttgcagtttgatctcggactgctgcgctagcagtgagcaaggctctgtgggcatgggacccgctgagccaggtgcgggatataatctcctggtgtgccatttgctaagactgttggtaaagggcagtatttgggtagcagtgtcccagttttcctggtacaatctgtcacggcttcccttggctaggaaagggaaatcccccaatcccttgtgcttcctgggtgaggcgatgccctgcccttcttcggcttgccctctgtgggctgcacccgctgcccaaccagtcccaatgacatgaaccaggtacctcagttggaaatgcagaaatcacctgtcttctgtgtcagtcacgctgggagctgtggaccagagctgttcctatttggccatcttggaatggacccccaatgctgtatcttttcttaaatttctgtaacatgcctgttgagtattcagtattcttttcaattttcagttcatcatgatctttgattatttcatgatcagcatactattaagtggcatggattctctgtgatgctgatggactatcctttcaatacatgaacaagattttgtttttagctttatgtaggatttttccatttttattaacttctgttcattactttcaacatagaactttcatagttggtccttctctttcttcagatcatatatatagtggtcatttcaacaccatactcttctgtaagatatttcagacttaacattgctgtccagttgctataacagcttgactttctgttttgtagataaatataaatgctttcctttttttcttatcactgttatccacagtgatatctgcaggcctttctgaccttgtcaacagtatctttatactgcagagcagagaataagaaaaaaacacagtaatgcacatagatattggcctcttgtggggcattgtgaggaacctgccattggcgtatccagcctgtacatataccattttattaccctttgtggacatgcttgcgtgggggaatctggacatgtgaggaaaatatatattacagctgaaagggcctgggaaagtcttttttcccttgaataaactgtatattatactctctcattttgactgtgacccatcacatgaagtcaggagtagaattttccacttgtggccttatgtaaagtctcaaaaagttttggattttggaggaattctgatttcagatttttggattaggggtgttcgaactgatataattatgctatatatattatgtctatatatgttaccaacccaactatacatttttattattactttacataattatatgtcttttaaggaagctgatagaaaaaaggggagaacaagtatgtagcatctatatttaatttattacatataccatcttatttactgtgattcttcttgtggatttgagttaccatatggtgttatttccttctccaatatagctttgttcccacctgccttcttgatgctgctattgtatatttaacagttctgtatattataggcataatgatatgtatttaattaaatacatatttaaaattaaatacatatttaaaaagttgatacataatcgatatacatattttcaggacatgtgataatttaataaattcacataaaatttacatatgaaatcagggtaataggatatctatcaccttaaatacttgtcttctttatgctagaaaccattcaaactattcccttctagctattttgaaatgtacaatagattattgtaaactacagtcaccctactgatctattgaacactaggtcttatcacttctaggtcttatttcttatatctaactgtatatttatacccattaatcaacctcttttaatcagtctctccccctgcccttcccagcctctggtaaccaccaatctactttgtctcttcatgagttccacttatttagctcctacatatgaatgagaacaggtgatatttgtctttccgtgcttggcttattttacttgacataacgaattctcatttcatccatgttgctgccaatgtcatgactccattcttttttacagctcgataatccattgtgtatataaaccacattttctttatccattcatccatggatggatacttaggttgattccctatcttggctattatgtatcattctgcaataaacatgggagtgcagatatcccttcagtgtactgattttttttcttttaggtatatactcagtcgtggagttgctggataatatggtagttctatttttttttgaggtacctccataattttccatggtgactgttcttatttacattcccaccaacagtgaacgagggttccattttctccacatccttgctagcattcgttattctttgtctttttataaaagctattttaactgaggtgagatgatgtctcattgtggttttggtttgcatttctctgaaaattagtgattttgagcattttctcatatacctgttggcaatttgtatgtcttttgagaaatatctattcaggtcttttgcccatttttaaattggattatttgtgtttttttttttcttttgctgttgaattgtttgagctccttatatattattattatgaatccattgtcacattgatagtttgcacatattttctcccattctgtgacttgtttcttcactttgttgattgtttcctttgttgtgtagactctttttagtttgatgtaattccagtgatccatttttgctttggttgcagtgcttttgaggtctcacacaaaaaatcttgcccagaccaatgttcttatttccccagtgttttcttctagtagtttcatagtttcagatcttagatttaagtctttaattcattttgatttgattttttaatgtggttagagatagtggtatagttttattcttctgcgaattagatagtctttattcagttttcccagcaccatttattgaagagactgttcccattctatgttcgtggtgactttgttgaaatgagttagctgtaaatgtgtggatttatatctgggttctctattctgttccattggtctatgtgtctttttatgcaagtatcgtgctgatttgattactatagctttgtagtatattttgaagtcaggtaatgtgaggcctctagccttatttttgctcaagattgctttggctattcagggtcttttgtggttctatataaattttaggattttttgcgtttgtttatttctgtgaagaatgtcatggtattttgatagggattatgttgaacctgtaaattgctttgggcagtattgtcattttaacaatattaattgtttcaattcatgagcatggaatatctttccatttttatgtctttaatttctttcataagcattttatagtttttcctgtatagatctttcattttagttaaattgactcgtatgtattttatattctttgtagctattgtaaattgaattgctttcttgatttcttttttagattgtttgctcttggcatgtataaatgctactaatttttgtatgttgattttgtaacctgcagttttactgaatttatcagttctaataatttttggtggagtttttaggtttctttaagaataggattatgtcttctgtcaacaaaggaaatttaacttctttctctccaatttggttgccatttatttctctttcttgcctaactcttgccaggacttccaatatcatgttgagtaacagtagtgaaactggacatctttgtcttgttcaagatcttagaagaaaggcttttaattttttcccatttagtgtgatactagctgtgggtttgtcatctggcctttattattttgagatacgtttcttctatatccagtttgttgagggtttttattataagaagatgttgaattttatcaaatgcttttaaagcatctattaaaatgattatatggtttttcttcttggttctctgttgttgtgatctgtcatgttgattgatttgcatatgttgaaccatccttgcatccttgggatgtgaatcccacttgatcatggtgaatgatttttttaatgtgttgttgaattcagttttctagtattttattgaggatttttgcatctatgtacatgggtgatattggcctatggttttctttgtttgttgtgtccttattgggttttgatatcaggataatgctgtctcgtagaattgagtttgaagtatttcctccttttcaatttttttgaagagtttaagtagaattagcattagttctttaaatgtttggtagaattcagcagtgaagccatcaggtcctgagcttttctttgatgggagacataattacagcttcaatcttgttacttattgttggtttgcttaggtttaattttctttatttttcctcttcttttctttctcttcttctgttttctttttctttcttcctacaggatctctctctgttgaccaggctggagtgcagtggtgcagtcatagctcactgtagctttaactgccagagctcaggtgatactcccacctcagcctcccaagtatttgggaccacaggcacgtgcccagctaatttttaaattttgtgcagagacagagttttgctatgttgcctagactggtcttgaactcctggccataaatgatcctcctacctcagcctcccaaagtgctgggattataggcatgagccactgcacccatcctattcaagttttctatttcttttttcttttctttttttttttttttaagacggagtctcgctctgttgcccaggctggagtgcagtggcgcaatcttggctcactgcaagctctgcctcctgggttcacgccattttcctgattcagcctcccgagtagctgggactacaggcgcctgccaccacacctggctaatttttttgtatttttagtagagacggggtttcaccgtgttagccaggatggtctcgatctcctgacctcacgatccacccaccttggcctcccaaagtgctgggattacaggcatgagctactgcgcccaatccaagttttctatttctttatgatttaatcatagtagattctatatgtccaggaatttatccatttcttctaagttttccaatttgttggcatgttgtccataatagtctctaataattctttgtatttcttgtggtctcagttgtcacctttttcatttctgattttatttggatgttctctgtttttctttttttttttaaatatatgcacacagttttatatataatgcagcatcacaccatgtagggcatttactcttattttatacattcagatatgtttgaaacacttcttaaggctacaaaacagaacatagaaaaataaacaggaatatattcaacacttacaaaaagtgatatgataaagaatataaagtactagtttccttttaacacttcaaaagatacgtatatatactttttttacaagtaacatcacaaatgatcacatcttcacatgctcttaaagtattatttgtactcagtgtaaggctattatcgtttttcatacacaaaattttcagctctgtaacacaatgcaatttttaatccattcaagtaagttcaaccccaaagttgctgcttcccagcattaagacatgcacccactcctcttctaagattttctaaaacttgtatttcggggagaaagacctcttttaaaaaataatcccaattagtgggagagtaaatggctgacactagtagcaaaaccttagttatttgaaaataacatattggaaatgagacattattaggattctaaacaaaaacaatagcatttagacataaagtaggaagcaaaacacagtacacagaaatagtgtagccaaatacgtattctcttcagctacactagagtggaccttgcttagtatccttaagtaaaagacaaaacatttacctcatctaaaaatgaagggtaaaacaaaagaggccaaaataaatattgctagtttctaggatggctgaatgttttctaaaccagaaatggttagaaaggaactttattgcaccaagtcaatcataagcaagtttgcagttcacaggcattttaattcaaccttgagtcacaaaggaaacaacacactgcaagaatacagtctgcattaaataagatatatcggcattgtggtctgggaaacctactcttgccaggacaaggcagggtctgagcttaggtctgccatgaaaatgaatttgtgggttatcagtaaacagtatgaggactacacagatgccagcatcctgctgccaaggagacatggggcaagagttgaagatttatttgagaggaaatgaagagacatacacaacaccaaagggaaaagggggctggaataaagttcagccaaagcacctaacacaaaaaacaggtgagctttggtcagtctgttcttcaaaatatgtatgatcataatatggtgaagtttcataatttccaactcaaaaatgcaaatgatcctcagttctatacttttgcctctattctcttataaagaaatatgtcaacatacagtatgacataaacagttaaaatgaaggacaaaagcttgcttagccttagtttgacctcagcataaggcaaaatcccgtggactaattaatacatttaaaaacaaacttaaaggataaaagcgaaaccaaccttcatgcaaagattaattttaaaactatcaaaagtcagttcttttattccggaggtcactgagaaaagtaccatctgctaaaattctctttcaagcacttcttccatcatatcctagaggtgagatatgggaaacagaaagcaaatcagtgtttccttcaggagctatatattctgttactcaattgaggtaagacaaagtgacaatgaagatatgaatagtatttccttccaatttttaaacattttcagaagctgagataaaaccccagtcaataaaatgcagcaacaacttattttggactcctgagatcaaacacattgaactttcaaatctggtgtttctatcaaaatgtgattttcattaaaatcaggtaagctagtcctacaaaaaaaagcataagctgaaagtggaggaccctctatcttctcattccttaactgagccaccagtgttaagaaagaaatggcttaagcggtaccttcaacaactattctagtttagaaggtgacaacaaattcctttcaatagattctctcaaaaaatgttttccacacaaccatcccagtctttacaattttttacctagcaccatcataataaaatgttatctttcaaagtgctctctaaaatcctgttacattatctaaatgctaatcactactcaaatcagcagttacacggacgttaggtaattaaaacagcacagaggtaaataaccattattacagtacagtggcgattcactgagcccagctggcatccaaacattcccataggttatcagagaacccagaaaactcatctgtttcagtttgtcaaattcaagtgaattgtattttcttaagtaatttgctttacaaaaaaagaaagtcaccgcatctggttttggctaggtgtattacacatggtatgcaaagagaaattactactatgttatttgcatagcactcaaacttcctgatcagaagataatctcaacataataaaagagtggattttcacattggtatgtacaaataaggaatataagctacagttatttttacaaaataacacagatgaatgaatactgtgttaattcagagttcaatctccaaatgaggacagagtacaacatgcaaagggaacctctagtgaatactgcaaagactggaagaaagcagaatggaagatgttacctacctaagggtaacaagctataaaatacaaagcaaaaccattttctagcagcatcctctagaaaagaactagaagtcacaatcatattatcttctatacgatagttccagccctgacaaggagaacatgcaagtgtaaagtgaaagtgatacataaccaatggtgcaaggggaaaaaaaatacacacacagtaactctagaaacctgtcaagctaaaaatttttaacatttcttctcacaaaatatttagaatctgtcagtgcattagtgttaaagtggcatttagaaaacttctgcagttctgactgatgcagattattttcaaaatgcgtagcatctacatttctttcgagtaggcaccatgatatttacaccagtgctaagaattcttggtggaaacagccatttcattggatttcctactatacttctgtgcaatctcaacaaataccaaaattcaaaaatataccttatgaatattaaaagaactatatacaacattgctaagacacagttaataggctgccttatgtgaatattaaagagaagacattattcaagtttgacagatatcgagatgaaaggcctttgggttggaagcattttaaaagacaacagtgttttaggctgagaattgtctgagcccagtttatgactaaggcattgcataataaaatagacatttctatttggtgcaacgttatgtttggaatctatagtgtgtcaaatggtgtattttcttgtcactttagtaagcactataaagcacacatttccaacatttgaaatcagacttataaacttataaggaaaaagccaaacactaaatctataatgttttatattaagctgcttataaaaatactttaacaaacatctgctttttacgaggacagtcacttgatagataaacagattctgaatgaagaaaaccggcaatgccaggaattaacctgcccccttgaactcatgtccacaatgtcttgtcgagtatgggagggaaggtaaggaggctggggagaggaaagagttccaactggggtttttactttattgtagttttttaaagccttcagaaacattccacctaagagtttctgttagaaaatacttcggcaacaaccgtcaagcgtgctgtcccctatggccatctcccatccctgatctcctcctatctcccctaaatggtcgccctctgacatttcgatggtactgataaccttcatcccgacttctgcttggctgtcctttccaggactcctcacttctcacatgttgatatccgcccctaccagaatagccccaatcacttttgtacttcctgctcccataagtttgattatagaactgcttggatctaccacttctcaaaatatgacacttcattttcattttctgaactctcttcttttggtctttgcactctgctatccacagagttggccccagggctgaccacatcagcagcagtcttaggatcttttactttttctgttttttctttcagactttgaatggtccttttaggttcaagttcaacaggcacaatttctctctctctctgtttagaatctgagtgggagggtgagcctttccctctgctacaggagggatggaagccaatgccatatctgcctttcgtgtctgggaagattgctctgtccggccttcgtctggcttactgctcacacttgcttcagggagagaatgtacatgttcactcctggctgctggaaactcatctactgtggaaactgaaccacaatctttagacagatccagattttccagagacagatccaattctcctttctcatcagagggcaggacaatattctgcctcattactggattttctatgaatccctgaaaagggtacccatgccaaacatgaggaaagaaaggaggtgcaataggaactgggcctaagaatggattgggtccaaaagatggctgggggaacatattcttgccactcagtgactcttcataatcagcatgcagaagctgcccaggggtctcagattcaagatcagcctggtaagacaattgtccgtgactttcagacacctgagatggagggataaccagaggtgaagaaaatgtcggcggtccaatcactggctgtagcatttgaccattaacactagcctcagtctgcataggaaagtgggcatcagtacaggtacaatcactttaattctgggcggcaggagcctctttgaaccagggattatgaagataaacagggacagggacctttgggtacatcctgcaggctgccaggtaggcctggtgcagagggtacaggtaagaatgtggggcccacacaggacaactgtatgccttcacaccaagattgaagaagaatcgaagaatattcttatctttaggtaggtcctccccagtctgacacagtgaagaaggtggtacaatggctcgatctcccttttcattacaaggaaacccaggatagagtgggtcttgataaaggctcaatgtctgaggcaaaggcatcaagggctggttaactgcctgtattgacacaggaactggagagggtgttaaatgagtttgggatacagcagaatcaggtccaggggtcaaagtctgtgtcactgaccgaccaggaattggagcagggacacctgttggtccaaaagttgtaggttcacttggccaggctggcacagtggctggtaaagaaggcactgcaggagttagatgtacctctggagaaactagaaggggagctggatttgacaaagacacatgttctgctggcttttgttctgcaggagaagggcactctaacttctttgactttgatggtgatgaaactgttgcatatttatcatcagtaatattctccaatatgcttggttcgggtcttttatccaactatgtccatgaatagagtctttgtcttttcgttcttctgtatccattctccgcctgcttccttttctatcacttacgtgtgatgattttctctggacacatggattgctactctgagaagtagcaatagttagattctcgacttgtgtgatcagaatcctcaactctttcacgatcaggttttcttatgatctgtgaaggtgtccggctaagatttttgtgctcactggagaatttctgagactgtgaccctgaagaatgactagagaactcacgttgtcttactcctgaaggatgctgcagtcgaggaggtagtgctaatggggcttttattggcttgcttggattctttggccctctgtaatccatatcagaatggaaattttgtccagaagtggaaggttttttcatcttcttccctgacactgtgttccagctttctgggggaggtgccttgaggttctttgatgtgtactttcccagttcttcaaccaaaactggtccattctcagaatgaactccttgaacgtctgcattcaaaaattttccattgtgatccaacctaacttgacatttgtctccaacttcatattgtaagccagcagcaatggaataatcacgtttttgctgagcttgtttagactccagccaaatttcatattccacatttctatagactgcaggattgagtgacttaagaacctttctagccaaaggcaggctagtagagttcccattgttcttcagctgctcgttgcctgacaaaggtttaaatccattcacatcagcagcagcaacagcagttttactcttgcagctgtcatcctctgaatctgatatttcactgttgtcttcatcagctacttccaacgtgtctagttccatcacaattttactaacatcagttttaaataccttctcatacagcaattcataaaggagagactgacacatagcagagctttctttatactttacgggatacacaatatcataatgatttccatttgaaaaacacagtaacaccttttcaggaaaattattttcagttacttgtgaaggagaaacattaggttccagattagttataaaatctttcctgtacataagagaaagggcacttatttccatttgtcctacccattcctgtggattttccaagcgctttaaatatccttcaaatgatcctcctataatcgcttcaaatttctctctgttctctcgaagacagtgaatacaggccattctgacttcaacatggcgagactgagagtgcaatacctgctccgccacggcccggaacaggcacgacccgtccttggcgaccagtttccgatacaagcccagtttccgcagataggcgtccatgggcgtcgcgtcctcgcggggccccgcgccgccctggtcctcgccgtcggggacgccgacggccgcctccatgttgctggtcctgctgcaggccaggcgcgagggctagccccacatggccaggccgccggctgctcgacgccccggcctggggtaggcggcggctcgggctggggctcgggctccgcgagcggcggcaggcggcaggcggcggcggcggcccgaggcagcggtccgcgctctccgggcgcgtaggggagccctgcctaatgcatggctgtccgtacgcggccgcctcctcggagcgaacacgcgcccacgacaaacggggggagcgggattaaggaaaaccccgagagtgagtagtcacttcccgacggcctcgctgcccgactcaggacccaggccgggggtcgccgcccccacaagtttcctcgtctgtaccggtgtgaagcgagaaaagccccgccccaggcgcgcacgccgggccggctcaggtgaagcggggcctgcgtcccccgcgcgctccccacgccgggagccgaggaaaccaaaaaagaaagacgcggcctttcgtttccccaccacgctggagggcgccggaggggcggggagcgggtgggggctccccctggatcttctctttttttcttagccttgctaagactaagaattgtccatttttgtttatcttttgaaaaatgtggctttttgcaccattgatcttttatattgctttttaagtctcaattttatttatttatgctctggtatttattatttccttctgttaattttggatttggtttatttttgcttttctagttccttaaggtctgcattgttagattgttgttttctttttttagaagtgtacttttttgatacagctgtttattgctataaacttctcttttagtactgcttttgttgtatcccatagattttggtattttgtatctccactttcatttgctttaagagattttaaatttccttcttaatttcttcattggctagttggtcattttggagcatgttgtttaatttccatgtttttgtgtagtttccaaagttcctcctttctttggtttctagtttcattgtggtcagaaaagataagtgatacgatttctgcttttttgaaattgttgagactttttgtggcctaagatatggcctattctgaagaatatttcatgtgttgatgaaaagaatgtgtattctccagcaattgagtgaaatgttctgtaaatgacaggcctatttgatctagtatgtagtttaaatctgatgtgttttttgtttttgttgttgttgttgttgattttctggctggaagtccctttttattatttttttaagtttcttacttttgctgtattgcagtctacccctcactttaagtctattaatgtttgttttatatacttaagatcttgggtgttgagtgcatagatatttataattatgtccacttgcttcgttgaccccattatcattatttattgaccttctttatctctttttacaggacttgttcatagtctattttatctctttataaatatagctactctttgctcttctttgttttccaattgcgtggaacatctttatgccttcactttcatcctcatgtgtgtctttataggtgaggtcggtttcttgtaggtagtatatatttggatcttggtttttttttttcttcgccattcagccactctgtgctctttaattcgagaagcgagtccatttgcattcagggttattatttataaagtcgtccttactagttcattttgttgcttattttctggttgttttgtaactgctctcttcctttcttacatcttcctttctggttaagtgattttctctggtcgtatgttttaactcattagtttttatttttagtgggtctattataggtttttgcattatggttaccgcaagacttacaaacacatcttgtagattcaacaagttgtactatagagagattagagatctttgtaatttagctgttgagtatctttttttacccactaggcctgcctccttttaagcactagatggtgccttacgctcaggtttttctcagctctagtaaataattaggacactgcccatgctgagtgggagaggtaccagagaggttatcctggcagtgcgggaaggctgacttggagtttgtgcctgggaaacctgtggagtgaagctcctacaatgtggtgttgctgaatagccactctgatttggtgtcgtctcctttgattgagttacagagcagtttccagggttagggattgtagtcctacttgactcctttgtctctggctgttttcagggatagttctcccttcaggtactcccagtgcttcctgtagattgaggtagggacaggtcttctgtcagggaacccaagatggtgggaaagctggttggccaccttaatctcactttttccagtgtagaaatcatgaatcaggggaaagttttctgtatgcttgatgctgggctgattttgtggtgaggcatcgtgggtgaggaaatccaattccgttactgtctgctcagagttttttcattcctctgtgtccctgggaactgtctctccctacataatatttgcattctgggatattgctggcgataatcttggtgctgtgtatttgtttttggttttctgtgggggcagggagcaaagccagctttcttctgtgccaccatcttggaactggcagttcatgtattggtttatgtagttacttgtaaatcagtcaagagaggaaaggagaaatcagcaattataccttttaccagcgctcttttcttttttatcccccatggattattacgaatgcctagtatcatttcagcctgataaacttcctttattatttcttgtaaagcaagtttgctagcagtgaattctctcagtttttgtaattgtggcaatatctttatttcaccttcatttttgaaagatagttttgctagtataagattcttggttgataggcgctttttttttgtttgttttttactttatgtattttgagaatgatgtctcctaacttttggcctctagggtttctgatgagaaaagtcagctgttaatctcattaggattctcttatatgtgatcagttgtttttctcttgctgattttaagattttctgtttgtctttggctttcgaaattttgactttgatgtgtctgcatttggatctctgtgtttttcccttttggaatttattgagcttcttggatgtgtagatttatatctatacacacacatatatatgtgtgtgagtgtgtgtatatatatatatgtgtgtgtgtatatatatataaaatttacaaatttggatagttttactttctttaaagtttttcctgtgcctttttctctctcctccgcttctgatactgtagttatttatatgttggtgcacttaatggtatcccacatttctctaatgctctgtttatttttctgcaattttttctttcctttcttgcatttcatctgttacataatgtctattaatttatgttcaagtttgctgatattttcttgttcacaaatctaccactgagcctttctagagtgtttcattttacttactatacttttcaactccagaatttccatttgattatcttaaattatttctctctttattgatattatttatttgatgagacattgtcatcataatttcccttaacctgttaagcaaagtttcatttatgtctttgagcatatttgtaataattgctttgaagtgtttgtttgcccagtctaccacctgtgcctcatctagaggcagcttcttttggttttctatgtgtattgatcacatctttatgaagtttttttatgtctcataatttttttgttgagaactggatattttaagtaacatagcaactctggatactgatccctattgtggttgtttgtttggttattggtttatgtgtatataacagtgatatagctgaacaaattctgtaaagtccattttcctcacagtgtgtagcttctgatatcccagctcagacttttcccctcttaacctgactacttatgtggcatttctggattggcatagactatgtactggtcacaggttgtgcttacattccctgaggtaggtagatttttacccttaagtgttaaatgtgtgtgtggcttggtggctgctattatagttcagggagtttacatttttttttgtcctgcatttagccaggtgctagaagcttggaagttagttcctgagagggcccaaccttgagcatgtacacagtgttccagactgtcagggatgacagtgctgtttcatttaaccctggcttcataggaattacccctgggtcagagtagcttctgttacgtcgtgtttggccagaggtggtgattcagacccttgtgccaatgaagtttctccgctctgtcagtgggtacgtgtatagcttagagaacgttttcaagactgccccacgttctgccctgatcattcctgggtgtacacagcctagtgtttttatactgcctttctgactcctctctgatctaagagggctcttcttggctgtctctggttctctgcattaaacttctgcttgctctgcctttctgcttatattggagctcctagcctttcttaattgtttttcattaatatttccactgttttctttctttctttttttttttttttttgagatggagtgtcgctcttgtcgcccaggctggagtgcaatggtgtgatcttggctcactgaaacctttgcctcctgggttcaatcagttctcttctctcggcctcctgagtagctggaactacaggtgcacgccaccacacctggctaatgttttgtattttttgtagagttggggtttcaccatgttggccaggctggtctcaaactcctggcctcaggtgatctgcccatcttggcctcccaaagtgctgggatcacaggcatgaaccaccacacccggcccactgtttttgataatgcccttaggcatggggttctgctctctgttccaaataaagtcagtcctctcagatggaaatgtagagctctttgtccttatggctcgtctttacccctgagcaaagtctccatgccactgctcctggggctgaaggtgagagtcttttttccccagagtaacactccattcttagagtgggcagtggagtgctggtagcagcccttggtcttcttagctgactgctcctggcacaaaacctctactctgggaggaagttggggcggtggcagtcagggcccagtatttgcagcctgctgtacctggaatagaaattctaccttttgaatgggggctgtgtagggaaagagagacgggtcctctgtgtcacctctccagaacagagcttctacacctctgggctgaaggagaggagaaacaccagcagcctgcccttcccggggtaaaactagccacagactggaagcctgagggagagggagccctctgcctgtcttttgggtacatataccgcaggtagaggcttcataatacagacctggtaggatgtggggaatggtgcagtttgtaactcaaacgccacagactctgacttgttctgagattgagtacattttcttgaatgaatgtttctccactttttgtatgcccttagtacagtttccagagactttaaatgtttgttttttaaaaaaattttcagcagtttttaatttttaattaattaatttttgtgaggcagggttctgccgtgtcaagctggagtgcagtggcgtgatgttagctcactgcagcctcaaactcctaggctcaagtaatccttccatctcagcctctcaaggggctaggactataagcatgcatcagcatgcctgagtaatttttattttatttttttgtagagatggagtctcactgtgttgccaggcttgcctcaaactcctggcctcatgcaaacctcccttctcagcctcaccaaagccctgggataacaggtgtgagctaccacgcccggcctactagtttttaaaatgtagttttgccagttccactgagctccttattctgtcattctggaagttctcgttcatttttaagcttttaagatcaggtttgagatcttctttatatgtagaggcaaggaagttgttattaccaaatatgatttcctgaagatactatactcatgctaacaaaataaattatactttgttgtagtaaactaaaatttatatcagaaaacttgaaaccagtctggaaggcagccttattttccttatatagaccaggattttgactttaaactcattttccacacagcttttcaatttgatgattcagactgactgttcccaggctctgtaaataaagattctctttgtaacagataacattacggacaggctctaccagcatacccattgcccttgaaactttacaaaatgctttgccgctttgtactagctttttcttcttcccagcctgcttctaattacaaacaggaaaatcagacaggatatggcattgtgactgaacaagttcattcatctaacattattaaatacctgcttcataaccgataactggtgaatattctttttattacctataaatgtgtcctagcctagagccattcttactatggttgcgatattttaaagttattaatttaaatttgacttaactctttgagcataattatgcaaaatagtcatttctttggagagaaaacttactgtagaaaatggaaatgtttaatcttataaaatgcatctttttaaagaaacccagagcatctgtgaagcaaagcaattaaactaaatgttagcaacataggagaggagaaataactgtccatgtgtgaaaaggagacagtggggcttggtaacttaggggaagaagtgatgttcaggaggccttaggtgttgctttaatattctctgtactgctagctgtgaatctagacaaaaaattgtattattctctgcttcggtttttttcctgactttaattggaaaataatcacttatctctcctgcacattggattgtggacgaaaaaaatagtgtaatttgataaggaattgtataagatttgaagtgctttaggaatgttcaatacaatggtacctgtcccacccaaagcgatttataacagaaagctctgaaaggatgttgctgaaacactttcatttataacctggcctaaagcgaagtcttaggtaaggtgttttatagcggagcacacatgttatatgtatgctgtataaagggaactttcctattttctattctcttttctaatagagaaaagatagaactcgtaaggcaaatatttttcttaactattagctccaatctcattcttccaaatttttctggttattttcagaagaaaaactaaatttaggtcacactttctttccttctctctttctcacagttaaatggcccaatgaaatgaacattaataaaaaaaagcagtaggaattgtgaatagtttactggacagtttggtcttaaactttaaatcattgtctttattatgtggttaaaatatataaggtaaatagtgggtcctaaaccagaaggctttgatcctagggtgttctatttttcatttcttagaagccaaccaaatttaaaacatgaagaaaaaaatgggaaataatcataaagcattgcttgagtttccaaacatatataaaaaataacaaacccccttcattgaggtcaggcactgttataaatgaacttgtctcgttcatttataacattgtctcattcatttataacaacatcccaatgaggaaggagtctatcatttttcattttgtgaagagccaactgtggcctagacaaggcaattgaaacttattccaggttgctacagcttctaaaaataggatggacattttaaatgatgaaattaaaaggcaaatattttctaaattacccagtagtacatattctttgttaaaaaaatcaatgatacaggaaatcaaatttttaacaaatcatcaataactctatatgtttttatgtgtgtataattatacacacacaaacagagtgagagagagagagagatctgaaagatatgcagtgaaattatagcattggctaaccctggagaagaaaagtgagaaggtaccaggaatggaagtgatggttaaaaaagtctttagctttattttgaaagttctgattttttgcaagaagaatattttttatgtagtagttgtataaacttaataatttaaaaaccctcaaagaatgaggacaggaagccaaattccagattgagtttaattttctttgaccagcctctttgtctcctttctagagacttcttcattacaatacccaaccaagaatgtttaaaacttttcaaagataatgcatatgtgagttaattggtatagctaaaattatgaaatcattgataatgaagtataagacagtatatgacggcggctaagtgcgtagaccctgaagccaggatgttgggtttgaatcttgacttccttgttgtatgacctctctatgccttagtttcctcatttataaatttggggtactgatagtacctgtctctaggttgttgtgagacctaaatgaattttcatctgtgtagtccttagaacagtagctggcacgtagtaagtaatataaaggttactattattgttattgtatcctgacacttagaaaaactggtggtagattgttatatatacatccagacttttttctatatatgtgtgtaaacatttacatacacttacacagatacaggcacgttcacaggagtaagtatatttttattaaaattggattatactatttctatttttttgtaatcttttacactcaacaccatataaatatctttctatgccattaaatgaaatgactgtttaaaataaaaattagatgcatttgatcttaaccagcgtgatagcatgggtccttttgaccaaatacatgagcataagataaaattgaaaatgcttggggctatgctgaaacctgaagtgcttattgatgttgatatagcttacttaaatggttgaatagacactggcatattctacctaagattattattacttgcctaaattgttaagcaatgatgtccaacatttttaatgtttatcttcagagccaatatgaaagatagaaagctgtttttaaagtgtcatgggaggaaagacacttgaataccactctttgtaaagaagtaaaatgatctgtaaaaagtatacttgttattaatagaattatttcttcctccacctccttctggcttttcaggagatgtttcacaaagcagaagaattattttctaaaacaacaaacaatgaagtggatgacatggacacgtcagatacccagtggggctggttttacttggcagaatgtgggaagtggcacatgtttcaggtacctcctttcctttaatttagcagaagtgttttcgattcacttagcatcaccttgctgatgtatgtaaaatgagtataaatatagaacttgaagtcaaagcttaaggaaataaaattgtttaactaaaagaaaagttagaaattcttccagtgcttttccttttcttttccccaagttttcacactcatttatttagaagaaacaatagagggtgaatgtgactgagagttgcatggtgtcagtacatctgagcaactccaagtttggtttggtggacaaagagaaagggaagaacaaatccgtattaaacacttctgtatgccaggtattatgttaggtgttgtacattgattttctcccttatcctcacagtaacttggaagcagatgttaacattctgtcttacagtcaaggaaagtgaaactcacaaaagttgacataatttgtcaagggtcacacagctagttaaactgagatttgaatccgcactcaaaacctgtagtcttttttttactctactaaactatataaagaagatttaacttgagccacttagaaagtataattattggaataatctgtaaaaattgtaattatctggaaaaataactatatttctatatatatctgttattgaaggggactataaccagttgtctcttcactggagatccttaaaccattttcaatatgctggcttagttgtgattctccctgtgtgttgggaactagaacaggtgattagtaagtttccctcgcccctccattccctgtctctatgaccacagtaccacctctgtggccaagtcattaatgtgaacagctggtaaatgaaactttctggtttgtcttaaagccggataccaacagtcagtgttcagttagcagtgaagatatcgaaaaaagcttcaaaacaaacccttgtggctccatttcttttactacttccaaattcagctacaagatagactttgcaggtatgtttttttccctaatagttgtgtgtttttagtatattgatatgataaaatctacagctctgaaggtcaggattagttgatatatttgcaaacagtgaagtatatcttttttgttatatacaaaaatacctctataaaaattcaagttttaaaatcttgagcaacattgccttttataaaaggtgtgtttatatgtttgtatatattaatgtatgtgaagattgtcttatatattaagtgcatttaatacttgtcttctaaggaacacaaaacaccgtatcagttgttttattcatcccatcagtcttttgaaatagataagaacatttaagaacatttttactttttttttttttttttttgagacgtctcactgtgttgcccaggctggtgtgcagtggcatgatctcggctcactgcagcctccgcctcccgggttcaagcaattctctgcctcagcctcccgagtagctgggattacaggcacccgcccccacacccggctaatttttttgtatttttagtagagacagcgtttcatcatgttgacaaggctggtcttgaactcctgacctcctgatccacccgcctccacctcccaaagtgctgggattacaggcgtgagccaccttgcctggccagaacttttttactttaaggatcaaacagatgttaagtgagaaagtcataggtagctggcaatagtttcaagaacaacttttagctgagtgatctttctctcgatgtctttgtcagaaaacaatttctttaatggacattgccttctgtcattttctgattgatttggctcttccacagattagccagataatctggaaatcagccccactttggatttcatctgtgttatatgggcatgttttggggtatcccatgaaaaacctgatgaactgagctcctcaagtttcaggctgttagtttcagctatttattgcttagaggcaaacaagacctggatgggaggctttcttaataaaagtacattttgtttgctacacagcttggtcctttagctgttctttctcaattcctgtgagtagtgtctttatgacagtgttagtagtgtattgtggctgggtagggtggtgaaacgttaggaaatccccttggatgaaccaaggcccagaaacagtgaaggggatttgtccagtaagggattgatggaaccaaatatgcaataattattatcccaccaaagttgtttttcttgcttttttttttaattatcaagagttaaaaaccattagatccttgctcgtgacaagccattttttttttaatgccattaggcaaataagcaggatttaagaggccctgacatttgtccctctgttgcagtctaggcagaaggtatctggtaggcatttttagtcatgtgtacaagtatttttgaggaagaactgaaaccgaatgatatgcacagacaccagacctcatgtagaggatgaactgtatcaaagcatttgataggtaattcagcaagccacatgtttctgaaagaatattttttagtagactacactttttggaaacttgctctcagaaaaaagagtttattaaaaatatcattattaaggaatgggagttacatatactaataactggagttccccaaccctctgtgtaatgatcctgtttcagaggcatggatattagcatttcacatgtactctttgcagttatcagctccaaccattctgccactagccaactcaggttttctctataaaaatggtgaaaagtaaactaaaaaatgagatggtccaagaagatggcatcacaggtcttgctccacatgctgagatgatcttgctttttccctgaacagtggtaaatccagtatgtgtagagtctaggagaacacagaaaggacagaacacactttatactagccttagcctgggtgggtaaacataatcattttgaaatggaatgatgtcaattagatgagataaactggctagaatcttacattaagaatcactacttaactttgaggaatgaagaaatggacctggtaaatattggtatgactgaggcatggatgaaagcagaaaatgatacctttaagtacttagtctcttatcactagaatctttttatgtaagtttgtactgggtctagccaggttttctattttttaggtttagttatataattaaagagaaatcaggaaatgtagaaatttttgaaattctgtgagttgtacaagttttataatcatttccaaaatttttggagagatgaaagtacatttttcttcttaataaaccaaccacatttaatactgtaatttctctctttctagtactcttagctttcctaagtttagaactctcctagtttagtgtctgtttaacctaagtgtgatacagaaggggaatagaccgtgcatactgagcagtggatgaaatgagcatctttatgtgtgagcttacgtcaagcaatgaagctgtgcttccttgaataacacctccacaacgtggtacatagctagctgcatggtaaagtacccataatacactatgcttgccagctactcccgaagctccatgattcctgatcatcgcgtagcgtggctattaatcttcatgacactttatagtacagtgtacttttatgacttatctaatatcttgtctttgtatacagaaatgaagcaaatgaatctcaccactggaaagcagcgcttaataaaaagagcccccttttctatcagtgctttcaggtatggtaaagagaataggggtggaaagagtgggttttttttttcttactattggacagaaaaacaaatagactggaaatattttggtaggtcatttaataatattgatcttttaaatatcaaatcttgggccaggcgcagtggctcacacctgtaatcccagcactttgggaggccgaggcggcctgatcacgagtcaggagatcgagaccatcttggctaacacacggtgaatccccgtctctactaaaaatacaaaaaaaattagctggatgtggtggcaggtgcctgtggtcccagctactcgggaggctgagtcaggagaatggtgtgaacccgtgaggcggagcttgaagtgagccgagatggcaccactgcgccactccaacctgggcgacagagtgagactccatctcaaaaaaataaactaattaattaaaaaaatatcaaatctctcatttgttgacaaaatagcaacattattatttactctaagtgcttcctttcatgttatccttttccttcttgtatatttacattttttaattctttagaacagtttgcagttacaaaatgccttatggtctctgctctaaactcataaaataactcactgaggtaagtttaaattgttaacttggacgtactctctcagagccatacaattactggggccgtaagaattaggtagttgttcactttgtttccacctacattgatctccattggtcaactcctagaagtaatttcaaatttgtagagactaagggagccatagggaagatggtagaacagtggacaacagtattgctttctgttccctggaacttggttacaaattttcttttttgcttgctctggccataagaagtctgaaaaaggaggtataaatgtcagaagacaatacatatttattattcatgtgaatgaatggacttgaaggaaaaaatcttaaagcatgtctcctattttctaaaatgactcttcaagcaagtattgaaattcttttttgttcaaataatttaaaatgaaactggaaaaaaaaaaaggtagcatgttaattgcagggaatgcctatttgctccttccaaggagatttttgaaaggattaaagaaagaaatattttaagtttctgtcagtttgtttctcaagacttttggttttattttagcatttattttggttttattttagcatcacgatataaaagttattccaagtacttataaaatgaatgctctagtacttctgtggaatatagagaatagtatttccttactagctacgtcatatccacattctttagtacaaataatataataaaagaattacttatcttcagaaagtatttaatctgggagaaaaatgaaaaatgagacataataatggaagatgttattgtaattgtacattgtatctgctgtgctttggtggagacaagaaacactgtgatgggatcaaacactttgttctgtcacagactgtacaaaccatagaacaaagacagcacaaggagagaactaagcagaatggaggacaataagcaagataataataaaaggagaggactgtttaggtaagatacaatagggtgttgaaggtcagtaggtgctgatatagaaatatttatttactgtgggaatacattgagcatttatcacatgcaaggtaggtaatacatgcttcctgttggcaaggagttctttaaggctgttgactacataaaaactaaaaaaattttttggtcatagctaaaagatactttaggccaagtgtgttttaggcatttttttccctcacagaaaattggggaaatatttttattcattgttgtagttgaagggatattctccatattatatgaagtacttttaggactctctaaatagaagatcaacatgggcaaacaatttgaacagttcatacaacctcactcataataggagaaaaacaaattaataccagactaatttttactaccagattgactaaaattcaaaagtttgatcacacacctttttggagtggttgtgggaaaacagatgatttctatatttctggtgagaatgtcagtaggtacattcaaagacagcatttggttggtgtctgttaaaatcatgaaaaaatatattctttgactcagaaattctgtttcaaatatgttattttacagataaacaagtggacatgtaacatgacagatgaacaaatgtgttcctgtagcattttttttttttttttgagacagagtcttactctgttgcccaggctggagtgcagtggtgccatcttggctcactgcagcctccgcctcccaggttcaagtgattctcctgtctcagcctcccgagtagctgagattacagccgcacgccaccatgcctggctacttttttgtattttagtagagatggggtttcactctgttgcccaggctggtctcgaactcctaagctcaggcaatccatctgcctctgcctcccaaagtgttgggattataggcatgagccaccgcgcccagccagctttcttaatgcagtagcaaaaagttggaggcaagctaaatattattatggtgtatccacatggcggagttctgtgcgtctgtaaaatagaatgcattcattcattcatccagtacttactgagtgtgtactatgtgccaggctctgtcgtaagcactaggaataatgatgctctctatgcactgttacagaaagatctctaagaagctatgaagtaaaaaccaaaaaaacaggtgcaataaatgtatgctttatgctaccatctgtgtgagcaaaaagcttggcttgtattaacctaaagaagctctggaagaatacccaagaaactaattaccaggagatggggcaaaaagtgagacttggacataccagggactggagtgggaggaaaacttctcactgtatatttcttcacacatattaatttttaaatcacctatttgatttttttcattaaaataagtttgaaaaaagtaaactaaagatcggtttgaaatttattaatttatttagtaacctccaatcactggaggcgattggtgtgtcatgttcagccttttgctattaaatccctcaacatcactgtttttctgtattcacatcgggtggcttgaacatgtctgatagtttttaagatttactgactgactgtgctaataacccttaaaggtagtggactgttggagagaatagtgggcaattaacagagaagggtttaggtttgagttagaacttggagaacatcgaatgaatggttgaggagttttgattttattcaatagacaatataaatacgagtttcagccttttgttttcatcaggagcttgattttgtttttaatttctttgcctaaaatcttctttacattttaaagaaattttggaaatttcaaaaaaaacaagacagaactaagcaactgtttttgaaatttttatgatatatagggttggatattttccatcaaaagttcactattgaacacctaaaaagtagcacacatagacagtcaataatttttttttttttttttttgagacggagtctcgccctgtcgcccaggctggagtgcagtggcgcaatctcggctcactgcaagctccgcctcccgggttcacgccattctcctgcctcagcctcccgagtagctgggactacaggcgcccgcccccacgcctggctaatttttttgtatttttagtagagacggggtttcaccgtgttagccaggatggtctcgatctcctgacctcgtgatccgctcgcctcggcctcccaaagtgctgggattacaggcgtgagccaccgcgcccggccgacagtcaataatttttaaatgaagaaacggaaggctgtatttaattgcatttgtcacaataccctgaaaatgaaaattaagctttgaagaagggctaagttcttgacagtaattgtaatcggcttctgatattttgttttctcttttgctgtttcaagttacatctgtgaaaacgaggccatccctatgccaccacactgggagaatgtgaatactcaagtaccatatcaggtaagagcagaattgactgaatatacccatgaaagaaaccggaaatgactgcagtaaatctatgcaaatttatttttccagcttattcctctgcacaatcaaacacatgaatataatgaagttgctaatctctttgggaagacgatggatcgcaaccgaattaaaagaattcagagaattcaaaacctagatttgtgggagttcttttgcaggtgagatgatttctaatctgaaacttctcctttccactatgtcttttatggttaaaacataaatattgaattgtattaattttcagtggtgtagacatgctgtttttctcttgccgtattttgacctggtctcaaggctcttcagcattctcagggagtgaaagaggtgctctgtaaactttgcttgtagcattgcaatgtgagaagctccttcctttcaaggtttagagctatgcatcttggctgaaatcagcattacagaggagtgtcagagctgtttagctttgttgatatgacttccttggctaagccttttattagaagtctctgcaaacactgttttgtttttaaatcatactatcttgccaatagtcttttgtctgttttattttaaagaacactttaaaacataccttcaaatttcctgcttagcctaaagtttattttgtagatttaaaatctcaattccttactggatttaagtgggaaatgacccattaagttgggtgacttaaccaaagtaaagtccattacagaaaactttaagctattaaaggtattatccaaattagcctgttctgccatattttttatgacatgtaaaaaattaaaataagcggttctctgaaatattttcaattaacatttgtagatgagatttggtgtctaatatttttaaatatgtaagctgacttttaactttttattcagagaaattgcaaataaacacaaaagtagagtctaatataatgaacctcatgtatccgtcatcctgattcaacacctatcaagatttaccacacataaactatctccttttttgttattattgttgttgctgaagtatttttaagcaaatcccagaccataactcatttcatttctatatacctgagaattaggctgacttttgtttggtaatgatacatggaattctttcatggttctgactagttaatatggcctgcgtacatttcaggttttattctcataatagtttatggtaataaggggctttcagcttgtgttctttatagtcttgggtctattggccaaaccaacttttatttctgacaataactgagtttaactgagtttagacagtttaatttagttcttgtttagatgattcttttatagaggaagacagaagcctctgcctcctttgactttattctctcagtgaataaagtaagtttttctgaaatagtctgatgaaaatttaattcattattcttcatcagccctctgaagtggagatcaaattggtctcccccataacttgagtccccagttaaatcatagtggtaaaaatgtaccagtgactccctagaacattttatactaagaattccaatgggaacagttttactctggtgatgcccttcacggttttatgtaatgacataaattacataatgacatagaaatctgtgatggtaagtgaacctgccacctgccatgacagtacaaaatactgagtctcattataagggcagcgtgtcattttgacatcatcctgaagaactaaaataactttgtctgtctcactgtcacataacctatgactcaccatataggtagtcaggcccacgtgagtccatccagcaatagttttcaaattgcctaggcctctcttactttccccacttcttctaacaaaaatgtcttagtacctactttatgacaagcactgttctgggcacttgggatataatggtacagagaaccatagcttggagagccagaccattgtaacacagaaatgtaggggtcagcacagggagtcatgggagcacaaagtgaggggacccatccacctttgccaacaaaagtaggggatgtggagtggagtgggtagaattagggagccccagacaccagttggataggagaagggcatctcaggcatcaggggcagtaagaaccaaagtctggatataagagggagcgcagaaaattgaagcagcttcagattgaacagaaattaggtagaatggtgagagaggaggctagaatggtatcaagaggcagagcatgcaggagtttgtagtagcaccactggggtggttgtgtgatcgtctttagtagccttagttgagttggattgaaccagagtggaagtcagagagttagcgggggctagaccacgtggggccttataagctaaactaagaggtttggattttttcctgggacagtagaatgccattgtagaactttaagcaagagagtgatggatctgatctgcattttagaaaaataattaggctgtgtggtggagaagggatttaaagcagtggttctcaactgggagtgattttacctgctgggggacatttggtaatgactggagtcatttttgattgttaatatggcagggtgggggtgctcctggcatctactggatagaagccaggatgctaaacatcctacaatgcatgacacaacaaagaagaagcctttcacaacaaagaagtgtccaacacaaaatctcagtaattgaaatcccagttcatagcagagagaccagtttaggaaattgtttcagtaattaaactgagacacgttgggttgcctgacccaaagtggtatctgctgtgttggagcaaagaagagagttttgaggtattaagattatagaatggtagggcttggcgcctcacttattgtatgcgatggagtgaataagggagatgagaaagataactcccaagtttttggcttgttttacttgactaagggaatatcagtagggacatctttagggatgatggaaagggagtattagttgatatacagcagttgacatatgggtcaggagttgagaagagtggtgtagactagagacaaaggttttggagttgttagaaaatgtggggtaatagaaactataggaatgaagaagatgaccagggagcgtatgtacattaagaaaagaagagggccaagggtcaaattctggaagggatgaacagaggaagagaaaacccaaggaggaaactgacaaccacagaaagcgggagaaaaccaatagaagatgtaatcacagaagctggagggagaatgtggtttacacaagtaggtgccatctgtacgattacatactgaaaagatgtcaagtaagataaatttgaaaagttcctttgcatttttcaataagaaggccattggtaacttagatgaaggcaaggttggtagacatcatattgtgtatacagcaaatgttgacaactttttcaagaagcttggcagtgaggaggatgagagatgtgagaagacagctaatgtgggattattgttatgttatgtttttaaaatttaatcatgggagagaactgaacattgtaattggaaaggacctatggagaaggagaatttaaaagacttagagaaagagtggaagggcagttgatggattctagctcctgaagaagtgtggtgagatgaaattctgagaacatatgtcagaaaggagatagagaagggtggtccagttatgtttacagataagtagaggtagaggacgaaaagaggagttaggttaaggagttcttttctgataccttccgtttcttttgtgaaggaagaagggaggtcacctacagcgaatgaagtgtagggaggtgttgataagagggaaagaaaaggggaaagaggagatttgaaatggctactgtggaaaatggggtagaacgagctgtcttgggaaccacaggatttctgtcagcgttgagggcttagctaaagtatgtgaatttatagggcaaaccatgttatgtaatgtacttcagcagtacaaatgtaagggcagatagtggaaatggttggattgatccagagctgggaagtataaggcagcaaggaaataagagcatcttgttaataatgtgaatttagatcagagattctcaaagctagttgcaggtcagaatcgccagtggaatttactagcaagtagagatacctgtcacccgccacagatctactgaatcagaacctctgggttctgacatttttaccttaaaaaattccataagtggctctgatgttcagcaggatgacaggtgttctaaatctaggcaaatttattttaatccagagcatgaaagtattcttgctccagtgcagagcatgtggcatacacactttagccagtttggcactctagtccctaagaggtggataattttgagacatctttgagaagtgggtgcgacagtactttcagtaagttcgggaatgattgtggatctgggcaaaggtgggcagggttgtgaagaacttagtgtagttctgtgactttccttgcagatgtaactaaagttcatgaggccctggaaatcacctttagcctttctggaacaccaaggtcatagtctgtgaatgtccgcatttcgtggctgccttagtagtgggagtagtgggcactagaacaaactgtgctgtggggatacaaagctttaaccaccatgcccctgccctctgccttcaactggtatatatgcaccatctaatctagtaagtaagcgttgttttccatgcctgcctatgcccatactccatgccctttaacccacagtttatttataatatctaagagaaactccagtgaattttcaaaccgagattcaatcgaatttgtgcccgaaaagtagtgataaatgaatttttttttttttgagacagaatctctttctgacacccaagctggagtgcagtggcgcgatctcagctcactgcaagttccgcctccggggttcatgccattctcctgcctcagcctcctgagtagctgggactacaggcgcccgccaccacgcctggctaattttttgtatttttagtagagacagggtttcaccatgttagctaggatggtctggatcttctgacctcgtgatccgcccacctcagcctcccaaagtgctggaattacaggcgtgagcctctgcgcctggccttctttttgagatggagtcttgctctgttccccaggctgcagtgcggtggcacaatctcagctcattacaacctccgcctcctggattcaagtaattctcctgcctcagcctcccaagtagctgggattacaggtgtgtgccaccacacccagctaatttttgtatcttttagtagagacagaatttccttagagtggattctagtcattgcagatcatgaagcacaacattgacaagtttgacattacagaccatgaagcctggcattatgtatgatactaatgtttctttgagaaaaccagtatggattcactaatgccaaactaactaataggattaccatagtggtagatggataggccccttagacagtctagcttggtttctcactttatagtggttgagaaagtttcttttcaggaagacaagatggagaaatatgtgctggtgggtatttcaaagagaaaaactagtagacaaaaagtcttacgcaaagagtaactcgaaaggcatgcatgctctcttcttggatccttcaaaatttttatcagaaatggatgaaaatgtagagggcttgcttatcacacttgtgagggattcaaaactagaaggggtagcttatttgttgagtgagtgaatcagcagtcagaaagaccttggaagattgaaacagtgggtaaaaacaagtattatcttctttttttaatttaaaaaacttttttcgtttgtttttataaagggaacaaatgcgccttgtttaaaaaaagtgagaacataaagttctgaaaaaggaagttcttagtgaaagcatgctgactttttgtaaagtaaacatttgctaaatgcacgaccttctgatgtcatgcttaatggtctgaaaagactgtcacaaatagatcaaagcatatacatttaaattttgatacatactgccaagtgactcttgagaaagaccgtatgcgttttcatctctgtcaccatttaaatgcaggtatccattcccaaacatattcaacgagctgcctatcatttacagaactcagtctgagatacggatattttactgttatttaatttttactttttaaattactatatcaagtaaagcttaactgaaatctattgcattcagtttataaatcagttgcacagatttagcaagctaagagaggtctggtttggaaaagtcctgggagttttaaccgactacacacttgattatggatgcagtttgctgccctgttaccaaaatacattcagtggtgtcggtggagtcagtgctgtctgatgatatctggactgttgctatttcatgccaacatttataaactagaaagtatccagcagattcttgttaactaaagactgttgggataaagaaagacctagaagctatgctgtgtcaggagtggttgaaggaatggtgtatatttaaccaagaaaagaaagcctaggtaggtgttcaaatttgcaatgttgttttgtgtaagagtgatttgagttgttaatgttcataagagaataactaagaccaatcaatagaagtaacagaaggcagatttggtttggcattgagatggatgtactttccaactattacagctgatcacaaataaattgtgctgttttgcaaagtgagcacgtgatgctgtgagtacttgacactggatgaattgaagcaggcattaaagagctatcagaagccgggggaggggattctttttaatttttaaaatatgatttttatgaaatgtttcaagaatgaaaatgcagcaaatagtttgcagactcccatgtatctaccaatcagatttaacattttgatacttgtcacatttccttcctcttcacacagatacaggtgaagtgtttactccatccctgtcctactctccttctttcctcctgagattggtatggtgccttattgtttgtattttgtattttttactacctgtgtatgtatacctacataatacacagtattattttgagttctctatctctttttgcaaaattctttttacattcaatattattttttaagatttactatgttaatgcacatagatctacttcattacttttaacttttatatgtaaatacatgactatattcatttctctgtgaaataattttaggctgttttcagtttttgttttctgttacaatcagtcctacattaaatatgcttttatgtgttaggatagatttatccttgggaagaggattaaactggatggcttaatgtccctcccaaccctatggtgcaaaatttagtcaactgaaccaacattttctagtttctgaggataaaaagcatatgacatgatccctgctcaaggaattcactgtctaaagtctctgcaaactttgtattacttgtttgttgtctcatttttaggcatctataaaggttagctggtttagacaatcaattacctttatgatattggggcatagcatgggataactatagtttttggcataattttcaaccttaagtttcagtgttaactaataatttttgatgagatgatttatgtgtccaagaacatttgaaattatttcttttctagacttgctttgtccacttgttatttatattaaagtatttcctgttttacgctttctattgaaccttgctcattaagattaataaatgctacttatggtatatttctgtgtgcttttgtgtctgtgtatattgtgtttttaggaaaaaggctcagctcaagaaaaaaagaggtgtgcctcagattaatgaacaaatgctgtttcatggtaccagcagtgaatttgtggaagcaatctgcattcataactttgattggagaataaatggtatacatggtgctgtctttggaaaaggtaattatcagaattccaggtccaatttgagccccaggagagagtttcctctttttagaggaatataaatataaatatgaactgctttatggcaaatatatagagaatgataaaacaaatggattataattgcattgtgtacgagaatagatactagtgtttttgttttattttgtttttaagaaaatcataggtaagaatattagtgagcaataaggaatagtgggggaaaacttcacgttatttataatgttgtgaaaatccaagtttttcaatttatgtctggtactcaggcaaattaaggagagaggtgaggggaaaaggtatgggatgtacatttaattttctggtccttactttgtaccttgcttccagcaagagaactgactactgtttaggatcaggatatgctgcattttgaaaatgtaaattaatttaaaaaataactactaaaaaggccattccacttatttaactgtaaggaggtcagaaggtgttacataaatcccatcagtgttaggtaaatatgagactttgcaattcatttccacatttttttagagtaagaatgcccttaatgatgtctatctcttgtgtctaccatttcagaagagttggctgctttatcgagttttcatgtgtaggcagtgagccagtaaaatcatttttgttttggaatgctcagatatgaatagcattatactctctcagaaatcttttcatggatatgggattctattgtttccagaaatattactgaattgttatcccatatcatagaaatacggtttcttggggtttaaaagaatccctgtaggccatcggtttccactgtgctctctagagctttgctggatgttgacaagggaacagggtgaggaagtggtgaaaggaaatagaaacgggagggagggccaagcagtaaaactcagggccgggcatggtggctcacgcctgtaatcccagcagtttgggaggtcgaggcaggtggatcacctgaggtcaagagttcaagatcagcctggccaacatggtgaaaccctgtctctactaaaaaaatataaaaattagttgggtgtggtggcacgcgcctgtaatcccagctactcaggaggctgagggaggagaatcgcttgaacctgggaggcggaggttgcagtgagctgagatcgcgccactgcactccagcttgggagacagagcaagactctgtctcaaaaaaacagaacaaaacaaaactcaggtccaaccacacttttaatcattaaaccagttttatctgttttattaattgttttctttgtaagatttattttaaaaacagaagtctgatagctatattttggtgggggcaggggatggtgttggtggtgaggactggtctgtaccaacaaatctattcctatggcagtctatactacagctgtccataacagatggatttctattcttctcttaaagatctgcagatgaggaaattccacatctatttttattatacaattctatgcatctattctcctgacaaaatgtttttgcttgtttttaatatattcttcggagtaatcttggcttttcttggtcctctttgtttaaggaacctattttgctagagatgctgcttattccagtcgtttctgcaaagatgacataaagcatgggaacacattccaaattcatggtgtcagcttgcaacagcggcatctgtttagaacatataaatctatgtttcttgctcgagtgctaattggagattacataaacggagactccaaatacatgcgacctccttccaaagacgggagctatgtgaatttatatgacagctgtgtggatgatacctggaacccaaagatctttgtggtttttgatgccaaccaaatctatcctgagtacttgatagactttcattgatttcacttccaaatctcggtggtcaaggaagctttattcttttttgcaggaaggtttgctcttcagtcatctagccactaaatgttaattatctgatacttttgaaacagatatgaaaaaaagtggcctccatataaaaagacatactgacttcaaggttggtttttgttgttttgtttttgcctgtttcttgtagtcttgtttgttaaaagttgatatcattgatgttttaacacataggggtgaaagataccattcaaaatggaatcagctgagtctcaactaatgtggtcattgagatctttaaagtttacgtgtgtgttatcaggataaatgattttagtttaaatagacttattcgtataaatgttgaaaaaaaatacagacataaatgtgtccctttagaggaattgatcctttgtaaattgaattcaggtagtagtatcatccaccaatccatctgttgctttgttggtcttctgaaggggggatttaaaactctgaaacagtctgagcaccttgagagaaatcagaaacaagacaattatttgcagtgctgtcaaacaagccagaaggagaaaatcaaggtagaatgccccactttccagttgccttaggatagcaggctgcagcctcagacttgatcctgtcattctcctctgtctcccacatctgaattgataattgctgcaaaatgtcattagcctacacttcatccatcagggctcttggattcttacaccacgacttgctgtgcaaggtgtttattgcatcttcaaagtgaaactttaaattattattcaaacatttattttccttttgttttaaaaagagtccctacaatgatcacttctaagatttttttttaccttcccctctgcagcacacacagctattcaacaatgatttctaaaattcatatttcaaatttgtatctctccattttgaaacattatagaaagcatgggatgcttgagacaaatctggtttctcctttgaagtagctgttgacaacctactctcttgaaaagttagatataattcttaatcatgtttagtggaaatttgtttacctgttccatctgttttgctgtttcattgtaaggaagatgagaagtgttggaacagcttccctcccctaaaggtattctagcagaggcgagacagcaacttggcgggcatgttgcataggagttaagtaccagatggggaattgcccatgtgatggtgaagagtctctcacattgattttcttccttttctcctcttctctcctccttctcttctctcctctttctcttctcttctttctcttctcttctgtcttcctcttcctcttctcttcctctcctcttcctctttctctctcttcctttttctcttcctctttctctttctctttctcttctcttctctctctcttccttccttctttctttccttccttccttccttccttccttccttccttccttctttccctccctccctccctccctcctccctttttctttttctttctttttttttggtttggcagagtcttgctctgttgcccaggctgcagtgcagtggtgtgatctcggctcactgcaacctccacctcccgggttcaagcaattctcttgcctcagcttctccagttactgggactacaggtgcataccaccatgcccggctaatttttgtatttttagtagaggcggggttttgtcatgttggccaggctgatctcaaactcctgacctcaggtgatccgcctgcctcagccttccaaagtgctgagattacaggcatgagccgctgtacccggcctgattttctatgattctgcctttaaaagacagcacgtataccaagcctttttcagaaagcttttctcttaactccttctaatgctgaattttctctctattatcctcacccaattttggctgagagttagtgtacacaatttaacttcttagaaaaattccagtgtctatgcttatattgctcacttgaatcatttgaattagaaagggatctacaaataataaaagcaaagagtgcagacagattagggatagtaattcttaaagtgccatctatcccagatttccgttatagaccagcatatgtgtaattgtgcagtgggaggtaagtagtacccaggacattgcatgtacaatactttgaaacaaagtggcaacaaagatttcctggctcaggtatgcaccccagctgctggtttagatgaagtgctgagaatatttagaaaaagcgctttaaaaagcatctagagattatcatgaaaataattggagacaaagtcactaggctgctttgtgagaggcagcataccatggctctaaacccgttcacaaaaaacaatgttagagacattaggaattcaggttttgaaaatctttttttcgatttatttgtaatttacataccaaaaaaccacattaaaatagtcctcccttcaacatggctatcttttttcaagttttatatgcatagctctctcagcacttgaatggaaaaactgttacagcatttgggagttgtttttcttttagactttgcagatcttatctcaaggtgactaggaacccagagctaagtatctgtgaggcaatctctgcgaacgctgaacttacctagttggtttctatgaaatatgtagaatgcactgcagtagccattgtaagaaggtactataccggttttttggggcttgttgttgttgtttggtctgagaatgtactgccaacccctcttttataagagagaactgattttgatacatattttaaaatatgatagtacagagttaatggatgttaaaattttatttctttgttttggtaagtagattaaatcgagaatcatataatcagtacatttgagaattatataaccagtatataataatactggacacaaccatttgccatcttttcctgttatcatcccatagagtgggtggggagaatgaatagacataaacctagaataatgataaatggtttttaaaactctatattgaatacattccagctgataatgacttttctttttcaccttggtgatatcagcctcagggtaaaaaaaaaagtttcataaatcttttagttataaacaggaaagttttatattagtgtgtcatttcatttctagactgttgatggtgatgatgataaagaatttggagccaattttgatatatgaatgtattgcttttacatgtgatgattaaagctctccattagcagttcttggttgtctgtgtatatcatatatttgtttctgtgacttatgtatctcatctccaccttgtattatttaaacctaagttttcagctcaatcttagtggacccaaggagtttgttgcctgtaactcatatgtaccccacttgcggatgggggaagtctcttgttcttagtttgaatcatcatgagcaatagctaatcaaataacctatgggaaaaatcatttactgtgtgctattataaaaaaaaatccccaaacaggccaagagttggcatctgcagcattttttattcttggtgtgctcccctggctcagcggaacagctctgtagggtgtgtctgccttcatccaaggagtatccttcctacagcccatctaacctccagccactcgcactgtgtctaccatcattcctgttgaactgagttaaacattccgttcaacctttggcaagaaaggatggtatcaaaggctctcctcaggttagaactgagagaaatgaggggcagaatgattgactcattgtgataaaaattcaattgagctttgattgttgatctagaagagccacatccttccaaattctgttccctagccattcgagtgtttgtgattacctcccaaattgctaggaataacacgagaaacaatcttatggtgatcctagttgtgtcgcctccagattttccactctccttaaggattatttgtttattttaaaatattttcttttgcttaaaacaacgagacagtcaatttctagatgaaattatacactctgtacttgtaaaagagataaaaggtaatgaaaaatagcacggaaaggaaaaaaaagacccttgtcaaaaattagtgttgattagaaactttaacaaagtgattttagttatttttatccctttgcactctatgcaggaagagttttggtgatacgagatagtctgccacactttcttatgaatcatttcataatgttacttggggcaacacagatggaagaaatgaacatttcaaagaactatgaaatacataattatttgcgggctgcctgattagtgtgagtaatatatgccgggagaggtgagccctgaatatccaggagagaagttgaaagttcatgttttaaccttgactttttagcagtggtagtttacttctcatgtcttcagaaactctaggatggaaggtggtttggggacttacatctctctctttcctcctgtctccttcctatattgagctctacttgatccatctcaggtaaaaggatgtctcagttatttctaaacccaaacagtaaattccttgtaactgatctgagtctcctgctgtaagattttgtaacccattttctcagctttaattgcttggcttccatttgtcagcactacaggccaagcacctggctatttgaattctctcaccgtgtggctgcgtatctaagaatttagacactgtcttacttatttttaagtggcttttcataagattggagcataggttttatgccaaagacatttgtgttttctgcagcttcttagcattgctggaccctctaccaagaggttatacggtaagctgattctgattctgtggcttatgctgacttcatgattgtaaaccaacttaaggagagtcaccatccagaatttaatgaaatcatctttgcaatattgattatacatccagactgcacttgtgttttcctttttaaaaataccttttcctgaagggctcattatgctttaatgtctcctagataacatgtggaagctgtaggcattataagcccacgtttgatgaacagtctcagagaatcagcgtgcaagctcatttcctccactttattcctataagaagaagatcaagcctcaacttgggagccagctgatctgaattttattcctggctttgctgtctgattcagtgtgaccttggataactcaccagagagggaaggttcacttttcagaaggtgaagtttatgatagaccaatcagactctcgttgagagaaaaagacctgacggagcacagctagattttcctaggcaacatctgacctgactgaagatgatttttgagtttgggtcgggaaaatacaatagcagggatcatgatgcattgagaagaagcaagggcttgcagtaggaaggaaaaagaatggacctggttgtccatgaaactctgccactaattagtttccccactccctttctagttcacagctctgaattcttgtggcgtgccagggactgaacaagtcagacatggcctctgctctcatggaacttaaagtctagcagggaagacataatgaactgtaatgacaagagtgatgaactttcctgaaggggaagttcaggccactgtgaggctctgacagagggatttcacctgtcctcaggaattagggaaggctttcctggggagtgacatttgaatgtgaagatagaaagataagtagatgttaattaagggaaggaggattttatgtcccccagccacacccatctgtgccatatcaggctttggagagatgagaaaaaccagataggggtagaagcaaagttggaacattgtttttatcattaaaacaaagatgacagaatcaaaaccattcaaattgtgttgccccaaacccctgcgcctggtcctggggtcagccttaagggaaccaggacccagcagtaaggggtatgtggagaagggattgtgaagattttatacagtttaagggaatcaagaagcttgttgggtaaaggagttccttcttggcccccatgcctttgcttatgcctttttgcctctccctagaacacacagtcatattcctccctcttgaaaactctatttgaagcatgggctctggagtcagacgtccacgttgattcctggcgccaccctttaccacctgtttcacttgagcaggttgcttaagctctctgtgctgctgtttcctcatctataaagtggtgataataatagtgtctaccctagagggttgttgtgagaactggatgaagtaatacttgtgaagtgtttgggatgatgcccggcacgaagcctcagtaaatgctggtgggtattaatacgtaaggcccctcgtctttcaagaagtcttctatacctaatacaaccctcacaagctaggattcatacagtatttatagtgtacttggaagtagggacataacttttttttttcttagcatttacttggtcagtgccctttggccaaagaccaccaggagcaaccctgtaagttaaacaaattaggtttattactcatggcagccagagagcacacacaccctgaggaactatggggtgtcccggtaggagggtgcaagaaaagcttttgtagggtttgggctttggggatatggggaagggtctgaggagttaggatttcactctaattggatgccgtcagaaagcaggggcaattctatgatttggcatgttcataaatcttatctatagagagggaagtctagctgaggataagctgtaattagcaaagcagaagcagttgctcatctggctgagagaagtggttggtattctgtgggtggcacagtgaccttatttttgtctgttcttagacacaattatgaaatgaccttgttttgtctcattttattgtggtctcagaataaccttgtcagaggttggttttctgtgagatagtttaggttcatcagaataacatgccttagctgtgagtaccaggccagtttctaaatgtcagaggctgttctttttgttctcaacttgtctaacttttgtttgggctacttttcttcctcctgggaaattgtaagagaatgtatttactcattcaacaaaccagcaagtgggtacctgtactccataccaggcacgatcctaaacacaggacacagtagtgaaatctctgccttcaaggttctccaagtcttggataagaagtcttggataaaattgtgtttcagttaaccgttttgctagtttaaatgccttcttcagctttcccacaagtattccagcttgtactggatactttcaatgattaggaaatactacatgctgtagacaattctgaatgctagaaaattggttcttaccttgatctataatttctttttcttttcttttctttctttttttttttttttttttgtgaaacggagtctcgctctgtcacccaggctggagtgcagtggtgcgatctcggctcactgcaaccttcgcctcctgggttcacgccattctcctgcctcagcctcctgagtagctgggactacaggcgcctgtcaccacctggctaatttttttgtatttttagtagagacggggtttcaccgtgttagccaggatggtctctatctcctgacctcatggtccgcccaccttggcctcccaaagtgctgggattacaggcttgagccaccgcgcccggccttgatctataatttctttcctcgtatattccactgcttgggtctatatctatacattaaagacactcagaacgagttccctgcatgttctctagctgtttacgtagttgacccacgggcaatgtaggtgaactctggattttcatgattccttgctgtgctgactgctcttacattcttctcaaaagaatattttagtttaacaaataatttaatgttgattccattttccacatggatttagtgtttaggcctgttttgtccgactgaaggacagactacattatcagggcttttctaatgaaagtgtatgtaggcagttaggtgctactgcgtgtgagaacagcagacgctaggtggcagcatcttgcttcggaactggcacaacaaactgggcgctgagttcatagctgcattttagagagcagggtcaaaggaccttccagaagttatctagtccctgccaccaggtgggacaacccctggtcaaatccaccgacataggtatttatcccgtttatagtaactgctaggaaaaggacacatcttcccaataggaacctagtctattattttagaattttgcctggtgaaaattcttcctaaataaccgtgccacatactgtcatctaatctgttttccttctttcttcaggtgaagtcgcattaatttaagttaatttagaaaaagatcgttggccattttctgaggccgtgcgcagaaagactgttaccagtgagttccctgtcaaccttactccttcagctcacccatccacccatccctcaccttgccagaaagattctgaatcccctaacgtgcttctggctgtactccccagcttcttatttacctctggcactacctcctggctgtgttctccatcatgcttgagttatggagcccccaagttttgtcttccttgggggttcgggttaagaactcgggttcttaacattgtaaagttaacacctcagaacacaatatgccctctgagatatgatattctatgctctttttaaaaaaatgtgtgtcagaaaagatgggccataaacttagcttcaaattgaaacagggggcgtatcaactccagatgtttctgaagtccttctctcaaagtcttaggacttgaaatggtataccacaaatattttaaaggtataatttttatactcttcctacaaaattgaggtgaggccaatttgtgactgtggaagacaggaagaactgaatgcctgcgatcacgtttccatgtcagaaccaggcagagaccccaggcagtgtgattcccagtctagtgatctatcttccagtgtaatcgtgttgtgctgccgccatatatgcaagatcttggcactgatattgttcatttaaagaatttttgtagcaggagagtagtattgtgaaaggtgtgtgtcaggattttgtgtttgaaaagcaatgtgttctaataaaacacaggttttagagtcaggtgatcctggcaacagacccagatttgctgctttctagccgtgtagccttgcagaagttgaccggcttctcagaactgctctttcctcacagtttaatgctgttgtgagaattacctgaggctgtgtgagtatatggagcacttagcacagtgtctgacatatgctagttgctcaagacttagatacaataatcactgctggctgccgtgttccaggagaagggcctctgtggggccatgagtaaacccctgctagtctgggagaagtcacactgcagtggcatggtgtcagatctcaccctatccttcgcctctcaagaaacataagtaaggaacttggcatgcaggggagaaaaaacaagccacagaaaggccaggcaacataaatgagaacaaatctgtgattttgagttattaatgtccatttcccttggcttccaggcatatctgtttctcatccattccagaaaaccgttagtgggccagggggccagacaggtttatggataaggatagtatgattttgtatatctcttatacttttcattgccaacttcaacagaagcagcaatagtcacctgatacttttataatatctagatggtcatagatttagtgtatattttcaaactcaaggaaaataaaatatatcaccattttggactaatgacagggaaaatggttcagaagttgatgacaatactggtggcgggtgctgcaataaaattggataaatttgaaatactttggatagaaataatgaaaacaaaggaaacattcattatccattaattcactctcatttctggaaggaaggaagaaagaggaagaaagtcttagttttgttattatgtggttgcaggtgttaaaactaccaaacaaatcttaaaattagaagtttcaaattgttgctttggtcattaaatatttatttactatccactatgtgccagcagttatatgccaggccctgtgctggattaacatccaagatgaacaaggtgtggtccttaccttccagaagctcttggcctactgaggagatagttatgtaatcaaacaaataattccatgtgctaagtgctggtcagagacatgaattccctatcatgggaaatgcagaaagccaagggatcagctattcctggagagtagggtaggtgtaacctaagggtaataaggcaacgttttacctgaatcttgtaggaaaatagcgtgtgacagaagtgaaaaaggacaatccaatccctacaaatcacggaccagtgtgtagagccaggaaagggccctgcgtgtctgaagcgtgtgcagcagcaacacatggtcgtgtggggaaagcagggagtgggaatggaacagaataatttggggagacaaaaaaaatgttaagcatggttggaaagggatttgtattttaagttaaggagtttgggttttgtttgaggaactgaccagagtttttaagaagttggggcacagtttgtaagactgggtacgcagagatgtcattagtggagattaacaatgtggaagacagaacgtcgttggagagtgtggtgggcactgctcctttttcctggaacagcagtggtagcctgttgttctcccctgcttcaacttgtacatgtgaacctaagaagagctgctttctacccctgcccctgttcccaccttttagaatacaagacgctatctccttatctatagtgattgttcttggggtggataccagatgcaagctggttcagtcatagtgtcttgtactctacgctggtccacagtgtttggcctaagtaggggtgcatgacccagtctgaccccttccctggtatttttgaattttgaattgtcactaagggaaatctggtgatggatctgggaagttgcaactccagtgatgctagtggttttgtctttcatgggcgtaagaagctggtattcagtagggaaaagtgaaactaacacagagagaagcaaatatgagagataggagagttctggtggccttttggtttctgatttcaagcatcctgaagctggcttaattcctgccatggtttggttaacataagccaataaattactctttttgcctttgctggctagtgtttctgacacattagtcctgactaatgacaacaggaagataattaactctgattttgatatattacatttgaaaagacttctctagatggcaaggagctcaagagaaaaatcatggctagaaatatagatgtaaaagccacctttagataagtggttgttaaagctatagaagtggcttctataaagctatagaagttcacccaggataagtgtggaaagtgttgagaggccaaggatggaaccttgaagaatgctaatatccaagaatatgcagaagaggaggaagcagctgtttctaactcgtaccatttctgatgttagccagcccttccaatcttacagccctcagtgggaaaaaggtagtctattagaattcattatcgtgtccctagctttgggagtttttttttttttttttaaactgctctaggccacatctgaaatctgcctcatatagctctcagtcattggagtaaatataagcttccccaacatattccttcctgtatttaaaatctaagatcttataaccaaatgtcttctcttcttcagtattaaatccctcccttctttcagccatccctcgtctgataaattgtcaaattgtattgatgtcttttaaatatctctccatgttgcttatgaagggtgaaatctgaaacagatactgtatttgagctgtaatgtgactatcacagagtacagtggaactaatgtgtcttcctgatattaacctcatactggttgcactattgaggaatattgcacttgtcactaacaaaaaaatcacagatttttttctaaaaatttctagaagcccagaaaaatagaatctataattatatgattgaagttttgagcctaaacaaaggcctttacatttgtccctgttaaattattttttatacaaaaggataattactgtagcctaacatgtgtgtaaataattagaagcaacatacctggccaaaaataaggtaatattaaatataaacacaagatggaatatcatgtgtctgtgaaaattatctttgtgaagaatatttagtgacatgagaaagtgcttagggtataatgttaagaaagttgcagggtttaaaccatatgtaataaattgcaaaagtcttttcactgggaaagggagtgtgactcagacataacagaagcaatgtccctgttaaattttatcttattggtattaacccgttatcccagcttcaaaaaaaattttttatcttaattctattacctaattattagtcattcctctctcctttgtgctgtccaaaaattggtctaccaaacaggacataaaagtgtttatactattgggcaagtatagaggtctgcagtaaatatccagggatgcacttgaattttgggttacagtaaccatacctggatatattatttaatcactagattactctttagcaggatattattagaaaatacattcagactgaaaggcttcttaaaagatcatttcatcccatctccacacctctattcagatttggtattatatttttttaggaagaacattgtcctagtttgggccactgtaacagaataccacagactgggcagcttaaatggaaagttatttctcacagacctggaggctgggaagtcccaaatcaaggtgcctgcagatgtgattacctcccaaaagtttcacctccaaatactgtcacatgggggataagatttcaacataggaatttgggggcatttagcctgtaacaaatgttattgcccaagattcccatcggttgccaaaagtcaaaagtcctgaattcattgtgtaccttggtatatgattttgaccaagaaacttagccaagactcttgctttccttatcagcaaaatgagatttgctgtacatgaaggtccccatgtcagtctggtctgaggagacaagctacaacacaaacaaaaatgggatttgctgtatgtgaaggtcgattagaacaaaggcctttttaatcttaaaggttaagtgcatggaaagaacctctgatggaaatcaaggagtactgacagcacgatgtggaaaataagagagaaaagaaaaaaaggaagatggaaattctgacaaggaaattaagatgcatgtccatggatgttttttgttttgatgatagcaaaagagtgatatatttgcataacaatgtaagtattgtttgtacttaacaaaaatctagtttcctttcatagagttcttaaaggacagaaaatatttatctgtctgaacaccattagacaggtaaatgatgaatgagttaccactgaatacctcttgaaagctgatgtctgtcaaatgttgaacttctgggagagaagtataacaaaatacaaggaagctcaatggtcaatatttgcaaataacaaagtactccttagattggaagttactaccttagcaatgggcaatattaccccaacaatattaagtactgtgtggtttaatattactacaatttgaggcatattatctaaatgatttaagatgtgattaattgtttccagatttttacccagtgctgtggtttgaatgtttctgtgccctccaaaattcacatgttggaaacttcatcatcaatacaacagttgggaggtaggacctttcggaaggtgtttaggattaatactgctataaaaagcactctaggtagtgggtttgctctctcctgttcttctaccttctgctatgtgaggacacagcaagaaggcccctaccggatgctggcaccttgatcttggaatttccagcttccagaactgtgagagaactgtcaggtttgttgttgttgttgtttgttttgttttgtttttaatagcagcacaaaacaggctaagatactcaggatttgttttaatcaggtacgataaggtgacagacacagagtttgaaagaagttttctttcttatacttaagagaaggatccatgccatgcccttgcagggccacatgggggaagtatcagggtcagtcaggaggcagaaggaggtgagaggggaaagcatggcccagagcatttattgtggttttccagggaagtaatggatgagacaagaaaggcaaatatgaggaagtttgggggttggatagtagttctggtaatttcagcaggccctggattataaaggtggtctctggttgtttgacacctggtcctggggtgatttaggtcaggggaaatactggcttgctgtatgagagttagataaagttgtggttggagatacggcctttggattgtttggtgtgcgtatgaaagacaccctcagcagagtcctttgctgtctaggaattagccggccctgggagggccagtctgtccctggccaacagagcactacaaaatttagaaaataaaaagtatgattaatacataaataagtgtatctttttaaataactgacaaaatgagataaaattagttaggactgaactaaaatacagtctttatttctcactttactcctcattttgccgcctgattctccctaagaagatcactgtctggatagggcacaaatttctcttgtcctctgcaactgaagttttgggatgaacgcctgtgggtgacggtagtgatgtcgtgttcccaggatgcatcatactctatttactgtccttgggagaaaatcactgactgccttgcagctgcctaccccaacatcttgtccatggccaaaggcaacttcacggtcctctgtgtcaccacattcccacaggaacccatttgctgggaaaatgaaatacaatgtctgcatcttttgttttttcagtcagcccacaatggataatgaatccagacctcaagggcaacttaatgacagtgtccaacccctgagagggttattatgcagaagttgggggccagctgctctccatcttctttgagaacagacaagaggaattggatttaaaccatggcacaagatgtgtcagttagacattagaaagaattgcctgtcacagtttgaggcatggaattggtgaccagggacagctatgaaactgcttttcttggggacttttaatgaaggaaagactggcagatggatgaggcaacctgccagggtaggtgtgacatagaaactacctttttgatctccctccaggagtacatgtgcttgtccttagaaccactctctcataagtcttagcacaagatgggttcgtaccttatctgccctactagactctagcaatctttaggcaatgacaatgtctagcatggtgccttgcacacaattgacgttcaagaaagattttttgcatgtgtgagaatgaattaagatgatatttgtctttgaaatacctcaattcctcaccttcctcttttccaccctcttttttattcagcaccctttctatcccaggtgatctccaaagtctcttccaactcagaaattttagtagtctgggtttacttatgttgttagtataccatttttacctttctttagaaagataggtcttatgagtcacacacgaatgttccttaataacagaataatgatttctaattatatacattatttcaattaacactgaaataatggactggtgtccatcagtggactgggcgtcatcaaccgaagtttgcaaataagcagtctaaagctaagattgtgacctgtcgaagcttaaatagcaaagaaggatgtaaactcacatctgtctgaccccaaagcccagcacctagacacagtgggttttcttactcaggaaaatacaaaacttaaaaaagattctaaggaggagagcccaaagacattagtatccaaaaagagaatagcaagccctgctactggaatgagtgagacataaattgggctgtatgaggaactgaaaacctcagctacatgtaagatcagccctggcatcccagctgcttagtcctccctgcctcgatcccaactactgcttagtgcctgcaaaacgcaggcagttccccaggttgtctgttagggtgggaggttgtcaggtgccagaatctatagaggcacttagggcccggatatctgagcttatgttactgctctgcaacctggggactctagcatttcatctacctgaagagttaattttcatccctccctttctggcctctgaaccactggaaataggatctctctgtcaacagtgcctttgactgtttattttccacttctccagttgcattttgttctcagcttggatcattaacccacggtgtggaaattttgatcagacttggatcctagaggaccaacgctgtggtgtatttagctgctatttcagtaatagcaaatacttaaacctgtaagacactgcctataggctgtctgcattgagttgtttttctaccaaatgtgttcatctgcccagactccttttaaagaaagtagtaaattccctccctgcaattatagtgtaattcactgggaaagtgtggtttaatttgtgcatcattttcttggatcaaatgaatcaccctaaagcaatcttcagttgaagttttgttattacaaagcccgagaagatcgtccaattatcatttagagtggttatcagcctgttctacagtaggaagctgaaaaggaaatgcagttttattttcagtggcccttatcttggtgtccaaccactgccatcctccatgcttaaagagggcaggaggagctggaacttggaactgtcattttgaaaggatgatagactctagggatacatccactagactttttttgttttttgtttttgttttttttgagatggagtctcactctgtcgcccaggctggagtgcattggtgcaatctcggctcactgcaagctctgctttctgggctcacaccattctcctgcctcagcctcccgagtaactgggactacaggtgcctgccaccatgcccggctaattttttgtatttttagtagagatggggtttcaccgtgttagccaggatggtctcgatctcttgacctcgtgatccgtccagctcagcctcccaaagtgctgggattacaggcgtgagccaccacgcccggcctacacccactagacttttaaattctttgaggatgagacctatgctagacatttgtattcaaggtagcacggcataatgattagcaatatagactctgaagccagacagcctgagtttcaatcctgcctcgagcactagctggctgtgacctctctgtacttcagtttccttatcagtaaaagtacctgtctctcagagctgttgtgatggtgaagtgagttaacctatgtagagggcacaggacgcagcctgggctataataagtactgtatatctaactgtatagtctggcactgagtaggcttaataaatgtctgcgaaggaatagcagcattccatcattcacctgtaataatctctttgtggtatcatcactactagatcaaaaaggtagggataaatttctggaggaaaaaacgttgtagatagttggaatgattgaccaaggagggagtgaaatattttgggggaggttcttatgaacatattgactctcctcagtcaggattcccatgtatagtcctgcatattaacaaggagttggaggcctctagagagaaaatggcactgcaaattcttcaaacaagagaaaacagttgtcctctgctcacatagatcatacatcatagcacgtagatttgcagtgtgccggtctattttgtaaatatgccaccgagttccagtaggggcacagctaagtttctgcttatttgttggcagtgagattgacatatccagagctaaaggatacgcaaaacctttccagtaggtttgctagcttcacccacttctaggcaatcttgcagctgagtctcccaagtatgattcttggcctctgttgcatttttacctcctggtgcctgcttcttacaccatcagtgccacctctccccatccttctttgtccgcttttgtgacccccccaagcctttggttaaagaataattcagccattcacaaaacttagaaatcatagaaaacatgagtgtgatccagcagaggagcgttgtctggttgtctcgtaaacattacagatgtggcagatccatttggctttactatgtctgtaatatatatgtgtgcatgtatacatgtgcacacacacacatcaaattacacatctatacgttaaaaaaatatggtgtttgtactcacatggccctaagctataaaatatcttgcttttcctggtactgaaggctttctgcttcctgtgttccttctacttttccataattgtaatctcagaacattcacatgacaccaaatgttaggtgtagttcaatgcctagaagtcagagcaagaaaaggagagatttgcctccatttcatagtttcctagcatgagaacatttatattgtcccttattatacacaagtcttccttgcattccccactgtctagactccaagatcttcggagagaggtgctgcttctcaagtctatccccaccttctctaatagtgcccagcacacaatttggtagatgaagtaggaatgcttatttactcgattgtttgtgtgtttgtgtgtgtgtgtatgtgttttgtttgcaaagagcagaaaaaggagtttattgtaggactacataagaactggaactggaaaaaaaaaatcaggatttcaaaacctgcccgctttctctccctttgaaactatctcacgtgacgaattttcttatctctgcgtatctgcccttctttcctttggtactcattgatccattccctccgtattccccaacctaaattctgactgcttaatgtagaatcctactacatttattggacaacatccttcttgttgggctgcctcatgggttgaatcccagtctatgattgagctaccttgggtcagatgcatattccagtctaatcagtaaccactcctgcctgaaaagactgcctggccttgctactttgaaggatgggggttggcggggagctgtgggaaatgcagttagagggatcaatagatgatgcaagagcattataattcatggcagagtgtccctgaaaaaaacggtgctagtacactgtagcaaagaaacaaaagggctactaactactgggtgattgttaccaagcccttcacatatgttaactaatttaacctttttttttttttttttggtggggggcagcgggggaggtatgcggagtctcactctgtcgcccaggctggagtgcaatggcgcgatctcggctcactgcaacctccacctcccaggttcacgcggttctcctttctcagcctcctgagtagctgggattacaggcgcctgccatcatgcccagctaattttttgtatttttagtagagacagggtttcaccatgttggccaggctggtctcgaactcttgtcctcaggtgatccacccacctcagcctcccaaagtgatgggatgacaggcgtgagccactgcgcccggccttaatttaaccttttatgatgtaatactagtcttgtcagatttcgcaaataagaatacaggaaggatacccgtataatatttaggatatacttatattaagaaattatttgtgatttttctgaaattcaaacttaactgggtatattctagccactctatctccattttacagatgaggacactgaggcaactcccctcaccccagggcacatagctaggaagtggcaaagccaatctggctggagtaccctgtactagccactctgctactctgctgcttttaagtctgtattaatggcaagcacgcgcgcacgcgcacacacacaactcctttatccttgccatcgtctttcaaagataagaatcaaagaccaaagcgtccttagatgttgtatcagagttcaagcaagggacagaaatcaccgcagaaatttggacagggaaaatttaatataaagaattgttgactatgtaaagttctgttaactactgaaaggggaaaaagaactctaagaagcagcaaggcagttaactgcagaaagtggcttctacacctaagactaagggaaaaatgaacaaggaaggaacttacaaactattggaaaaggtccctgcaaggctggattcagacctctgaggagagttcctggttgttacaggaacatgctgcctgtagtcctggtgccaaggaaacttgctgaagggtacccgctgttaaactgcatagggcagcctgccactgctgtaaaccctgaccgggataaccgcgtgccgatctgcctgccactatatgggaaaacagaaaactagatgaagaagaaaaaggcctctgtcttccagccatgcattgttccttccacactccttattgtcaaagcctaacatggagccagctggcaaaggaaaagtgtggcctgtagagttcagccccagtattacaaagcaggatgaagaaactgggattggagctgaaagacaataaattaataactgatacagatggaaagtacatttttcaacccaaggatagaaagaagccccaaacatcatcacacaaaaggaagacagattggctgagagaggcatttacattaaaaaaataaaatactgaaggtttacagggacacatctcttggagtagagcagcctacctccaaggtattggataagcaagacaaggtgttataaagcctattgtgtaaatatatacagaagactgagaggttttcaaccgaataaatgaatgcctggtacagcgttaatatagctgagaaattcatcctgtaacaagttgagtca

SEQ ID NO: 6 - DNA, 43726 bp, Homo sapiens
  source 1..43726: mol_type = other DNA
gagcaaggactcggggcccgcgcggcgcctctcggggccgggccgccgcctctgcgctcagccccgcaggccgggcatgggtgggggcgccgggccgtcacgatgagcgccctgggcagcccggtccgggcctacgactttctgctcaagttcctgctggtgggcgacagcgacgtgggcaagggcgagatcctggcgagcctgcaggatggcgcggccgagtccccgtacggccacccggcgggtgagcgcgggcggagggcgtgccggggtgcgggcgcggggccggggaggggcgcggggctggggagggggtgcgggtgggggtccgggtccggggacgcgagaccgggcaggggtcgggaagaggccggggcgcgtggccggggagggtaggagtcccggtccgggggcgcggggctgaggaggagcgcggttcgcgggcgggcctttctccgcccggccctggccctcgtgctgcggcgtccctgttgcacccccagttccactcgaggccccgcggcgcagtctccatccttctccgcagtctgcgcgcagcgggagcccgcggctgggccgggcgctgggctcctcccgacctggggccgctgctgtggggacccggggcgggggctcgagtccgcaagtgcgcgttcggccgcggggcaggaggggcgggaggggacgcgagctccggggctcctggggcggagcgcggcgagcaggcgcccaggtgctgggtctgcgcgtgggtcggaggggaggggagaccagggtccggtcccgaggccaggggtcccgcgtgtccgggggagaggaaggagcacaggtgactcgcgtgcggaagaggggaccccccacgacagcggccggagagcgggttccagggcgaggggaggccggagcgcccagagctcccaggcaggcagcccggggatcccccaagtttgaggcttgaaagccggcgcccggcgagggggtggacggctccggggaaagaaaggcgggggcaggaacccaggagaagggggaacgcgcagaggcgaacacctcggctgggagtgaggagcaggcggggccttcacccacgcgcatccctggaacagcttggacgaggccgaccctgaggctgtggaaggagcccagcctgtgcccaccttcctgccgcgcctcggggctgaacccacgcttccaacagagacccgctctgagtcctgggcggaggagggcagccgggcgtggagatggagtcttggtgggaaggacctgtcagctctggggcctgggaagggtctgggaagccccaggtccagggtcctgccagagacgaacttagcgggagagggtgggaggaagcgggatctgaggctgctcggtagagggtgcaggctgtcccctaagggcagctccaggcaggcggcgtgagcaccaagggagtgtggcacggctggagggggtggcctgagactgtggagcgtggggtgggactcaggtgcccggccacacctcagcttaggggacggggtgaggaatgggcagagtttgggggagcagctgagatgggcttgggctcacgaccagcacccagaggcctcctgaaactgcagcatgcgggggagtctctggcagctggtgggtgcagagtgtgctccgtggggcaggaggggagcctgcgtctctacctgtccccaggcgccgctgcccccgcatgtcctacccccctccccgctcggtggcaggtctctaggaccgtggtgtccagtaggatgccatgagccacgtgtggctgtggaagtgtaattagaaggaaagaaaacaaaaagcttccattcgtcacatttctagatagttcggatgtcgctgtggcaaagtccgagggccagcgctgccctggagattgagcgcctggaggacagggctggagattgagcgcctggaggacagggctggagattgagcgcctggaggacagggctggagattgagcgcctggaggacagggctggagattgagcgcctggaggacagggctggagattgagcgcctggaggacagggctggagattgagcgcctggaggacagggctggagattgagcgcctggaggacagggctggagattgagcgcctggaggacagggctttgtctgcactgtgccctcggggtctgggctcagtgagggatgaaccctaccagagctacaggaataaagcacccaacaacgtgtacgcccagacgaatatggcgctttaagagctgtgcgtgttttgggggagcagacggttgacagtgttgagtttgattgaaggtgagtgccgtggggcgtgtgtgagaagggtcacgcacagaatgtttgtgaaacttccttctggttggtttgaatggaggctcggggatgcttctgctgcgtgacttttggttgctacatgccgaactgaggacgaaccaaaacaatggtccaatgctttgtaataaaggctttcccttgacacggagggaggatttaggctaaaaatacacctcccaccgggccgggggcggtggctcacacctgtaatcccggctttgggaggccaaggcgggcggatcacctgaggtcaggggttcgagaccagcctgatcaacatggagaaaccctgtctctactataaatacaaaaattagccgagcatggtgtcacatgtctgtaatcccagctactcgggaggctgaggcaggagaattgcttgaacccgggaggcggaggttgcagagatcgcaccattgtactccagcctgggcaacaagagcgaaattctgtcttaaaaaaaaaatcccatcaagagctttattgtctacttggcctgagctgctgtagaaaaaactgatatcacgggtgtacccttgcaggtttttgatttaccaaatatttgttttagagttaagaaaagatattctgaaaaatagtaagaagttgagatcattatgttttgttttttattttttcagagacagggtcttctctgccgcccaggctggagtgcagtggtgtgattgcagatcactgcagccttgaccctcctgggttcaagccatcctccttttttggcctcctcaaatgctgagattataggcctgagccacagcacctggccatgtttttttttttttttaatgacatgtttcgctgagaaacactataggtgcttgttattgaaaggtgagggcagccgggcgcagtggctcacagctgtaatcccagcacttggggaggccaaggtgggcgggtcatgaggtcaggagtttgagaccagcctggtcaacatggtgaaaccctatctctactaaaaatacaaaaattagctgggcgtggtgccgcgtgcctgtaatcccagctacttgggaggctgaggcaggagaatcgctggaacccaggaggtggagggtgaagtgagctgagatcacaccattgcactccagcccagcgacagagtgagattttgtctcgaaaaaaaaaaaagaaagaaagaaagaaagaaagatgagggcgttcgtaactccacactccatttccctccacccaattcctcctgagttttgtagcccaggctgttatttttatattgtccaggtttatagcccttgcttctgtattgtggctgtagtgcccgcaatgatttagtatcaattcaacatttaaatacagtcagtgctcaccaaagtccttttaccatttatgtctctgttcattgtgctgtccctcttaatcacctagatttcattatcagtcgttttttcagaaggactcgagtatttcctgagtgtttttttgtgtctgagaatgtctgcccatggtctttatctttgaacaatgtagagatatcttggctgggtataatactcttagatttattttcttccccaacactttgcagctgtcattccaccatcccctggctcacatgtgctgtggggaagcctgaggtcagctgatttttccccatgtggaggcttgtccttcccttcatgaatttctgaggaattctttctttttgtctcatagttcttctgcttaaccagaccatgtctcagagttgaatgtttgtgttaaacttttagtatgaacgtactctttgagtttccaggtgtgtgtgtgtatgtgtgtgtgtatgtattttttttttcttagatgtagtctcaatctgttgcccaggttggagtgcagtggtgtgatctcacctcactgcaacctccacctcccaggttcaagtgattcgcctgcttcaacctcccaggtagctgggattacaggtgcctgccaccacactgggccaatttgtttttgtatttttagtagagacggggtttccatgttggccagggtggtctcgaacccctaacctcaggtgatctgcttagctcagcctcccaaagtgctgggattacaggtgtgagccacagtgcgcggcctgaatttttctgattatcttatgcctttcctatttgttggtaattttgatttcagtaaactgttctagctgtttctaacttattgattagttcagtaaagatgttatttttgtctcctaattttctcttagttttggagttttccttttttttttttttttttttgagatggagtctcgctctgttgcccaggctggagtgcagtggcacgatctcagctcactgcaacctctgcctcccaggttcaagcgattttcctgtctcagcctcctgagtagctgggactacaggtgtgcgccaccacgcctggctaatttttgtatttttagtagagacggggtttcactttgttagccaggatggtctggaactccgggcctaaggtgatctgcccgcctcggcctcccaaagtgctggaattacaggcgtgagccactgcgcctggccaatgtgcacttctgtgactgtgtctctggcccccgttatgtgaaagagactctcccatgttgtgtgaggctgtggggtgttaattctcatggtggtgacatcccttttgtgactctaccgtgatttattctccatcctgcgggtgacgggcatttgggtggtttcaggtttctgactattatggtttgttctgccatgaacattcctagtacacatcctttgcatttctgttgaaaggtccctatgcgtgtgaatcgctgggtatcaggcacgcaaatgtctgcacaggtttccctgtagtagattctcgcaaagcatttttcacttggtgctcccaccagcaaagctggaggccccggctgcatcatcttccctctcagcacggggctgtctctgtccttctgtggtgtgtagtttgcctttgcatttctctgatgactgagcaccttttcatacgtctatgcgaaattcctctttggaaaaatgcccaagtcggccgggcctggtggctcacgtctgcaatcccagcactttcagaggccgaggcggatggatcaccagaggtcaagagttcgagaccagcctggctaacttggtgaaaccccatctctactaaaaatacaaaaaaaaattagccaggtgtggtggcgggcacctgtattcccagctactcgggagactgaggcaggagaagcacttgaacccgggaggcggaggttgcagtgagctgagatcgcaccactgcacaccagcctgggcaacagagtgggactctgtctccaaaaaaaaagaaaaaaaatagaaacagaaagaagaaaaatgcccaagtcttatgtctgttttttcatttaggttgaatttctttcaatgcttgctaggagtgtttaaaatatagattctggctgtgagtcctttgtcggctgtgtgatcctggatagccactctcatctgcacgtcacctttccactccttcagtggtatttttggatgaacagaagctcttaattttaacataatccaaattatcagtgttttgtggttaggactttgggtcctgttgaacaaacctttgctgctcccagatttaaaaaaaaaatgttctctacaagcatcgttttacctttgacatgaatggctgcctccagctggggtgaggcctgaggcagggatcgagacacacttttttcagtcggatgccccccacccccaccccgcatcgcacggccaccgttgtcccagctgagagcccgcctgtgggtctgggtctgcaccgttggcccgcctgtctcttgtgtgtgtgccccgggtcagactctgtcttctgtggatgggcatgccctgtgctggccagggcagtcagatgcatcttgtccttgctcaggcagctgtgcccaggtgttccctttgctccgatacggtcagcgaggcctggattctccctcctgggcgtttgtcttcctctcggtctgtagttgcagggcagagttcttggatcttggaccctgtcggcaacttgactccacagactatgtggaccccactgctctgcctgtcacctcagcccacggaccgtgcgggccccactgctctgcctgtcacctcagcccacggaccgtgcgggccccactgctctgcctgtcacctcagcccacggaccgtgcgggccccactgctctgcctgtcacctcagcccacggaccgtgcgggccccactgctctgcctgtcacctcagcccacggaccgtgcgggccccactgctctgcctgtcacctcagcccacggaccgtgcgggccccactgctctgctggttacccagggaagtgtcttctgttctgcaacacacctcacacacgctggtacccctggttcctggtggcctggaccccatttccgtctggcagctgggtccccggttcacgctctttcccctcggaagttccatttctctccaggcaggggtagaaggaaggcgtcaccaggctggcccaggatatggtcggggcacagcagggccctgcctttccgccaccccagctggtgcttccaacaccagattgtgtcccttctctgagtgctgagttttctgccttttgcccatttttttgttgttgttttttgagatggagtctcgctctgtcgcccaggctggagtgcaatggtgccacatcggctcactgcaacctctgcctcctgggttcaagtgattctcctgcctcagccccccgagtagctgggattacaggtgtaccatgcccggctaatttttgtatttttagtagagatgggggtttcaccatgttggtcaggctggtctcgaactcctgacctcaggcaatccgcctgcctgggcctcccgagtagctgggattacaggcgtgagccaccgcgcccggccttttgcacatgtttattggtgacagggaggggggtggattaactacaccagatgccaccacctcttgcctcccacccttttccccagcatgagggcctcattgtcttctccaatcctttctcctggctgtttcttcagtgtccttttcccagcataaaagtcccattgttctttctttgtttcatttttgctaagagctaataataataaccctcacttactgagagggggaatcatcttgagagaggttatattgtgaggcccagagaggctgagccactccctcaagactacacggtgcgtggacacaccggggtgcaggtgcagggcctggccctcccctctgtttccaatgtttaatgttgggagaaggctccactgagggagcttttcttcccggagacgagcatcagagcctccgttatggaaagtgacacagttgctggggtttgctccttcctctttgccttggacagatgttcccctgggacatgcgtgcccactccatgctcccccggggcaaacgtgcacactccgtctctctccaattctgcagatcttcccctggacacacgtgcacactctctgttccccaggaacacacatgcacacttcatctccctccaattctgcagatcttcccctggacacacgtgcacactctctgttccccaggaacacacatgcacactccatctccctccaattctgcagatcttcccctgcacacacgtgcacactctctgctccccgggaacacatgtgcacactccatgctccctccaattctgcagatcttcccctggacacacgtgcacactctctgctccccggcaacacacgtgcacactccatgctccctccaattctgcagatcttctcctggacacacgtgcacactctctgctccccggcaacacacgtgcacactccatgctccctccaattctgcagatcttctcctggacacacgtgcacactctctgctccctgagaacacatgtgcacactccatgctccttccaattctgcagatctccccctggacacacgtacacactctctgctcccaggaacacacatgcacactccgtctccctccaattctgcagatcttcccctggacacacaaacacactctctgctccccgagaacacgtgtgcacactccgtgctccctccaattctgcagatcttcccctggacacacatgcacactccatgctccctctgattcttcagacagaggtggatttgctgattaatacagctactcttctggtttcccttggcaaccacctcgagatataaaacacgatttataaagtcatcactttcaagtttgaactgaaagtcaaatcatattttatcctgcttctttatagtgcagtccttaaggaggagatgatggttttctacttctttttttttttttttgagatgaagttttgctctgtcacccaggctggagtgcagtggcacgatctcggttcactgcaacctccgcctcctgggtccaagcaattctctgcctcagcctcctgagtagctcggattacaggtgcccaccatcacgtccagctaattttttgtagttttagtggagacggggtttcaccatcttggccaggctgatcttgaactcctgacctcgtgatccacccgccttggcctccgaaagtgctgggattacaggtgtgagccacgtgcccggccagttttctacttctttacctcctgcggtaccacttgtgagaaaattaatttttaaaatacattaaatgtctctatgcatttgaaaataacaccattgcattgtatcaagttttgccattagaagccctcaattcggccccacctcgcctgtgtcctgcagggtcctctccccgccctgatgaccatcctttagcttgacctgttacttctgtaaccccagccccaggtgaacctgatttccagtgacaggctgggagaggctcaaagcaagccagccaggtttctccaggcagagagagggtcagctctgggggctggaggcccacccatcgcccctgagtcccctgtcaccagcctgtccaccagcctggcaccaggcaccaccgtggtgcagagtggacgcagctggagcaggcagacccgcagtcctgcctcatcctgccagccgcacctgctcactgctcctcctgccccaggagtgcaggctgctccgcgctgggtgcatttggagtgaagacagtggcaaggggcgtcagaggcaacagtggaatcagctggtatgtgctggctgtgggtactgttcacattcagagatgtttttaacctttattttaaactttattcccaggattcttcagcttaattagctctatatacacaaaacctgaaaagaacaacagcatccaaagggcttgggcataaaaatattagagatctagactttatcaaacaaaacaatttttaaattttttttgagacagagtcttactctgttgctcaggctggagtgcagtggtgcgatcttggctcactgcaacctctgcttcctgggttcaagcaattttcctgcctcagtgtcctgagtagctgggattacaggcatgcaccaccatgcccggctaatttttgtatttttagtaaagacggggtttcactatgttggccaggctggtctcgaactcctgacctcaggtgatccacctgcctcagcctcccaaagtgctgggattacaggcgtgagccaccacgcccggcccaaacaaaactatttgtttatttatttatgtatttttgagacggagtctcgctttgtcacccagctggagtgctgtggcgtgttcttagctcactgcaccctccgcctcccggcttcaagcacttctcctgcctcaagcctcctgagtagctgggattacaggcgcctgcctccacgcctggctaattttttggtatttttaatagagatggggtttcaccatgttggtcaggctggtctcgaactcctgacctcgtgatctacccgcctcggactcccaaagtgctgggattacaggcgtgagctaccgtgcccggcccaaaacaatttttaaaagtggtcatgagggccaggcatggtggctcacacctgtaatcccagcactttgggatcgcttgagctcaggagttcagaccagcctaggaaatatagggaaacctcgtctctacagaaagtttaaaaattagctgggcgtgatggtgacttagtgtgttttgggccccggctggcagagagaaggatggactgatggacgctcagcaccatgaaatgaaaactttcagggatgtaaagtcttttttgaaaccgggtctggcttattgcccaggctggagtgcagtggtgcgatcacagcttaatggagctttgacctcctgggctcaaacagtcctctcacctcagccccccagttggctgggactataggtgcatgccaccatgcccggctaattattttatttttagtagagagagggtcttgctatgccgcccaggcttgtcttgaatttctgggctcaagcgatcctcctgcctcagcttcccaaagtgttgagattgcagacatgagccaccgcgcctggctgggggcgtaaagtcttgaaggcacctgccctgcatgatcggcagccagtcaggagggctggttttccaggaaccctgtgcttgacttctcagtctctccgaggatgccagcacctctcacagaagctggcggccatgtcctggagagagagccccagaaagctgtcagtggagaacaacgaggccattgtaacagatcttggggttttctcagctaggaatgagcctcaggctgtttttactttatgtgggttacgtatctcaacttcttgcagctaataattaattaattaccctccccctaatgtgactcagcaaagtttgctcctgaatttgaatcaactggtgtgttatttatatttgtgactcgtgataggactggcattttgtttgactaaaaataaaagcaaaaacaagtttacagaggcataaatatacatattaaactttagtgaccctaatacataaggccagaagttattatcttaataggaaagagtaaatagataagtatgaagagtatgaaattttctcttagattaataaaattcatctggaaataaagtctgtttcttccagctcaggaggccacgtatgtttgaggagagaacactgtggtacactcacgggttcaaattgcgtcgtgttggtttgactttggagagacatagaggccagcgtcatcagatctgggcatcatcgggggtgtgggggggcccacagacaagagtcttccatgcccttgacctctgagcacccttccccccagcactggacaggagggtctttgatacccctgagctctgagcctccttccccccagcactggacgggagggtcttccatgcccttgacctctgagcacccttcgccccagcactggatgggagggtcttccatgcccctgagctctgagcatccttccccccagcactggacgggaggaacgtggaggaaggtggggggctccagagctgctgagtgaagtggcttttggatgggctgctgtgactaatggaaaagagctgctgagtgaaggggcttttggacaaattgaaacagagatttattctctcacagttctagagaccagaagcccagaatgaaggtgttgcctgggccacgctcccttggcaggctctaagcggggacccttcctgactcccctgacttctggggtgctgctggcagccctcggcgttctgtggcctgtggcagcaccgttccagtccctgctgtctgtcgtcacacagccttctctcctgggtgtctgtgtccccaaatctctctgtgcttataagaacactagccattggatttagggcccacctaactcagtatgacctcatcttaacttgattacatctgaaaagacccttggccgggcgcggtggctcatgcctataatcccatcactttgggaggccgaggcaggtggatcacttgaggtcaggagttcgagaccagcctggccaacatggggaaatcccatctctactaaaaatacaaaaattagctgggcgtggtggcaggtgcctgttatctcagctgcttaggaggctgaggcaggagaatcacttgaaccccggaagcggaggtttcagtgagctgagatcgtgccactgcactccagcctccagcctggatgacagagtgagactttgtctcaaaaaaaaaaaaaaaaaagaaggctgggtgcggtggctcacgcctgtaatcccagcactttgggaggccaaggcgggcagatcacgagttcagcagtttgagaccagcctggccaacatggtgaaaccccgtctctactaaaaatacaaaaattagctgggtgtggtggcgggcacctgtaatcccagctacttgggaggctgaggtaggagaatcgtttgaatccaggaggtggaggttgcagtgagctgagatcgcaccatcgcactccagcctgggtgacagggcgagactccgtctcaaaaaaaaaaaaaaagaagaagaagaagagatcctgtttccgaatcaggtcacattctgaagttctgggtgaatgtgagcctttgggggacacttcaacccagtatagatagatggtgaaacccgaaaggacagtttcgttctcatgaaggaagagctgggcacccagggaccctgtgggtcccctcttcttggagcttcagcactggagcccctggccctgttggttcctgttggctagggccctggaggggcccctaggacctgccctggaggcaggccgggtgcctggggcccgccccatctgagcgtttcactgctgggctgtctccttgggaccctacgggctacacagctcattctgccggtcgtccatgcttggggttggagcactgaagcttcgtccctgtgtgcggtgaaggacttggtgactccaaggaggccccaggaatctgcgttcagttgagtgcacggccacagttgaggaccactgcgtgtgctgtctctttctgtggtgtttctcctcctcctccctccccaccctccttttcccttctggcccacttccccctccccctccctcctccgtcctccctccccctccccattcctttcctctcccgcttcctctctgcttttattgagatatggtttacttacagtaaaatgtctcccttcttgagtttttttgttttttttttccttttttgagacagagtttcactcttgtcacccaggctggagtgcaatggtatgatctcggctcactgcaacccctgcctttggattcaagcgattctcctgcctcagcctcctgagtagctgggattataggcgcctgccaccacgcccgggtaatttttctatttttagtagagatggggttttgccatattggccaggctggtctcgaactcctgacctcaggtgatccacccgcctcgacctcccagagttctaggattacaggcgtgggccaccgtgcctggccccgtcttgagttttgacaaagacagtggtgtgaccgccatcacggtcaaggtggagaacacctccaccacgcagaagtttccgcagcctctttgtaggcagcccctccccaaccccacctcctcagcctccaacgtgcctgcatcccggaggcctttgaacctggctccggtcactcagcagccctgagcctctgaagccatctgacttgtcaggtgcaccaagagctcattgcttttgattgtgggacagtagagatgaaccacagtccatcacccacccaccctctgaggagggtctgggtgatttccagcttttggcgatctatgaaaaaagccactgtgcatgtttatgactcgtttttgtgcgaacttgtttttatttcacttgggtaaatatccaggggtggagttgctaggtcatatgataaatgaatgattaactttataagaaactgccaaacccttttccacactgaccacaccgtttgcatccccgtcagcagtgtgtgagtgtttcagttgtcaacattctttggttttgttttttttaaatgttagccactcatgggtgtgcagtggtatctcattgtaattttttttttttttttttgagacagagtctcactctctcacccaggctagagtgcaaaagcgcaatcttggctcactgcaacccctgcctcccgggttcaagcgattctcctgcctcagcctcccgagtagctgggattacaggtgcctgccaccacacccagctaatttttgtatttttagtagagacagggtttcaccatgttggccaggctggtctcgaactcctgacttcaggtgatccacccgcctcggcctcccaaagtgctgggattacaggcgttagccgctgcgcccggccagtatcttattgtaattttaatttgcatttcctgtgctcatctaccatcctcatattctctttggtgaagtgtcttttcagatcttttgcccactttttcttttcttttcttttcttttttttttttttttttggaaacagggtcttgctctgttgcccaggctggagtgcagtggtgcaagtcatagctcactgcagtctccacctactgggctcaagtgatcctcccacctgtttccccagtagctggactccaagtgcacaccaccaggcctggctaattaaaaaaagaaaagttttgtagagatgagggtctcactatattgtccagactgcccttgagagatcctcaagagatcctgggctcaagagatcatcctacctcggcctcccaaagtggtgggattacagttgtgagccactatgtctggcctcttttgcttattttgaaaaacctgaattgtttattttctttttattgaattttgagaatgtttaaatacgttttggatgtaagtctttacccagaaatgtgttttcaagtattttcaccccatctgtgccttttctttccatttagtatcttttaaagaataagagtttttacttttgaagaaatccagttgatcagtttttttcttttatagaccatccttttaatgtcatatctaagaaatctttgcctaacccaaagtcacaaagattttcttctagaaattttataattttagattttacatttatgactatggtccattttgggtttttttgtttgtttgtttctttgtttgtttttgagatggagtctcactctgtagcccaggctggaatgcagtggcatgatctcggctcactgcaagctccatctcccggattcaagcaattctcctgcctcagcctcccgagtacctgggattacaggcgtgtgccaccatgcccggctaatttttgtatttttaatagagacagggttttaccttgttagccaggatggtctcgatctcctgacctcatgatctgcctgcctcggtctcccaaagtgctgggattgcaggcatgagtcaccgtgcccggccgggttcgttttttaatatagtgtgaggtatagattgagattcgttacttttgcacagggatgtctaattgttccagcagcatttgttgaaaagactattctttattgtatggcctttgcactttggtcaaacatcaattggccatttttgtgtgggcctatttctagactcaattctgttccatttttctattcagtattttttataccagtaccatactgtgttgattaaatatatagtaagtcttgagtttgaggagtctgagtcttccaactttgctcttttgactttccttttaaatgttggctttgttgatttctaccaagaaaagtcctgctaggatttttgattgggactaaaactatagatcaattggggagacttgtcatcttaacaatactgattctgtcaatcatgaacatggtatgtctctccatttatttaggtcttctttgattccttttattagtggtttgtagcttttaatatataagtcttgcacttttttttagatttatactcaagtatttcatggtttgggggctactgtacctagtgctatttaatttcaatttctgattgtttactgctagtatttaaaaatacaactgtttttttccatgttggccttgtatattttgatcttactaaattcacttatgagttctaatagctttcttattggtttttggagaggtgtatgtgtgtgtgtgcatgcgtgcctgtgtgtgtgtgtgtgtgcatgcgtgtgtgtgtgtatagtaatgtcatctggtaatcgagatggttttaatctgcatgccttttctttctttttgttgccttattgccctggttataacttccaaaatgatattgaattggagtggtaagagtggatattttcatggggaaaatattttctcattttcatggggaaagcgttctgttttttaccattaagtaaaatgttagctttgaggttcttttttttaagatgcactttatcaggttaagggaattgtattcctagtttgctgagagcttttgttgtgaaaaggtattggattttgtcaaatgctgcctcactgagatcatgtgggtttttcttttttgatttattgatgtgataaattgcattgatagattttcaaaggtcgaaccaaccttgcattcctacaataatagattgccgaatttggtatattttttattgatggagttatctcttttactttatatttttacttttaatttattgtatagtaagttattttaatgattggaatcacagtgctagagaaatcccccatctgagcccagttctggtggctccaaagcctccacacagagccttgagatgctttgctgcagggttgcttgtttcgcactcagagcctgggttgctgagtgaggctgtgctcatccaagcagaggggcttttttccctacccagtgtctgactgcactggttaactactgcttcctgtattaggagacttctcccagacggctgcttctaactgttcagaggtattactctcgtttgcctttttgtctagaaatgtaatatttcctaccataggtaagttatgttccctaggagagccagcaatctttgagttatataaattgatttttagccaaatcttcactaaggagttgggggtgggggagctcatttaccacttacctaccaaaaactcatgttttttgagttaatatattaccacatgtagtgttttggcaactgtgttcaatgtatatgaagcagatatatttgccttcatttttagctaattttctctcaaacatcattttcttttctctttcttttttttttttttttttttttttttttttgagatggagtcttgctctgttgcccaggctggagtgcaatggcgcaatctcagctcactgcctcccgggttcaaatgattctcctgcctcagcctcctgagtagctgggactacaggtgcacgccaccaagcccagctaatttttgtatttttagtagagacggggtttcaccatgttatccaggctggtctcaaacccctgaccttgtgatgcaactgcctcagccttccaaagtgctgggattaaaggcgtgagccaccgtgcctggcccagaaattatattttagaattaaaacatttgtatcaatacttcatatgaaaaatgttaaaattacatatatcattataggtattactactaggtagaaagaaaatcatatatatacataaacagtgaaatgaactacactgaaatattaatcgtagttgtccatgggtgataagattgtagtggtaaatatttagtaccaagcatgaatgacttgattttaaataagctttttcatatgcgatattttttttaacttcagaagcaaagagtgtcaggcagccttggtggggtggcctcctggaaccctccagcctccagccaggactttgagttgagaagctcacacacgtgggggaactgccgtcccgtcccccgagcggccccgcccagagcccacacccctctttggcaggtcgtggccaaggtgggtggggctcctgcctgcgacccagggccagggcaggactggatcctatggccactcccctgggtgtatgggaacctaggagagacccaggccccagtgtggggtccaaggctgcatgagacctccgtgacagaggtcaccccaccctgagagcccgggcccgcctgagttgagccctcgaaccctgccaggcctccggtctgagcaggacgggccagcccgaggacagctgcccccttctcaggccctgggagttgtggtcacaagatgtccagccccacaaccagcctcagggaatccaccactctgatgggttgtgaggggagctctgggatctggcccctctgtccctcccacagccactgtggctgccttgatcccccttccccaagacgatgtctcttcgtgagcctcccacgactgcgttcaccccgcagcctgctcgggcagcagctgccacgctccaggacactgcttctgggccgtgttccttcgtgtttccaggtgtcctgtggtggtgacagctcagtggaagctggcccctgccctgtgcttggtggaggctgccccctgccctgtgctcggtgacctgcaggtgcttagtgactgggcggggcagcagtggccgcacagggttggcgtggcctctgcagcacttgtccagcctgatgctggtcccaggcctcaccttttgggagtttagtgtcctaagacaaaggtgatttaaataaataaggcttgtggcggccgggcgcagtggctcccacctgtgatcccagcactttgggaggccaaggcggatcacaagatcaggagatcgagaccatcctggctaacacagtgaaaccctgtctctactaaaaatacaaaaaattagctgggcgtggtggcaggcacctgtagtcccagctactcgggaggctgaggcaggagaatggcgtgaacccaggaggcggagcttgcagtgagccgagattgcgccactgcactccagcctgggcgacagagcaagactccatctcaaaaaataaaataaaataaaataataataataataataataaggcttgtggtgtccttcaggctaccggagaaggtggttgctggtgggcgcgagctgctcctgactgttcagaaagggagctgctcagtggttcacgcctgtcatcccagcactttgggaggccgaggcaggtggatcacgaggtcaggagatcgagactatcctggctaacacggtgaaaccccgtctctactaaaaatacaaaaaaattagccaggcgtggtggcaggtgcctgtagtcccagctacctgggaggctgaggcaggagaatggtgtgaacctgggaggcggagcttgcagtgagccgagatggcgccactgcactccagcctgggcgacagagcgagactccgtctcaaaaaaaaaaaaaaaaaaaaacgcagaaagggagctgctttcacaaaaaccacacacttaaagtcagatgtgagcattttacggtgcaggtgtaaagcggcgttgaatcaccaccacactgcagcgtcagcaccggccacttccaggagccctgtgctgtccagtggccattcgccctgcccctcccctctgccccggggaccgccagtctgctttttggctttccggtgttttaactcaacataagacagatttctcaaaagctgggctgagagatgaatacgtctgtacattgtattgaatcaatatttgcaccatcaacagatcctcgcttgtgaaggcggttatgccacttactaaaatagaattaagcaggtggtagatgacttaaaacagattcctaaaatatttactcattatgcagctccaagtgtagagaatggtgtggcatttgacttctcccttttttgttcttgttttttagaaggttaaaattatctttttgtccctgttttctgactcactcagtgaacattctgacgggctttgttctagaagctttgtatatctttattatattttgatggacagagtacatggtaagttaatcagctaagtgcagtgagcttgaattgtattatcctaacgctaacactgctgatgtcaaaaatgtttcttagtttctcgtggaccaaaacgtaaggtaacacagagaaggagaaacggtaaataacgaaagagcaaacacacagatgggagataaggtaaaaaacaaaaacaaaaacaaaaaaaactgcaaagactgaaacaaaatggctccatcaatgggcttatgaaaagaagagtcttctcacaaattgaatttgaacatagctatgaaaggatatggtttgaggatttctctaggcagacatggctgcgttagagggtttatctttggaacagcattgattttagagaaaaaaagagagacttgaaatgagtttggtcgctgctcgctgggcccagtgtccagacgttctgggctgtggctgagggatggagaagaggccccgggtcaggtgcaggggtcgggcaggtgcagcaccgcagcatcactgacgccctcatctggggtcagagggccccacatccgggggttccagcagacttcaagtgtcctgcgcaaagaggatgcgggctctgtgtagggccaggccacctgtgcctggaaaccccaaacgcttgggtgctggccctggagacgggtggtggacgaggattggaaggtggacacgggaaggcagggttcccactgggaaaggccgagtccacagggacagagacgcggcgtcagggctgatggagagccacaacacaggccgcctctgggcctcggacctgtggcaagggggacacatcagggaagggccagagtgtgttgagctggccgctgcaggatgggccacctcctggaagcagcccggcttgtaatgctttctgccctgttgggacgggagaaaccagtgattggttttagctctttctgaggggaatctcattgtaatgagcttttacgatgggctgagaacctgggacttggaagaaattcagcttttagttcaggtattaattcagagatagcttgaacattaattgtttaaattagtaggctggccgggagcggtggctcacgcctgtaatcctagcactttgggaggccgaggcaggtggatcacgaggtcaggggttcgagaccagcctgaccaacatggtgaaaccccgtctctactaaaaatacaaaaattagctgggcgtggtggcgggcgcctgtaatcccagctactcgggaggctgaggcaggagaattgcttgaacccgggaggtggagcttgcggtgagccgagatcgtgccactgcactccagcctggacgacagagtgagactccgtctcagaaaaaataaataaataaataaataaattagtaggctaccggccgggcgcggtagctcacgcctataatcccagcactttgggaggctgagacaggtggatcacctgaggtcaggagttcgagaccagcctgaccaatatggtgaactctcatctgtactaaaataaaaaattatccaggtgtgatggcgggcatctgtaatcccaactgctggagaggctgaggcaggagaatcgcttgaatccaggaggcggaggttgcagtgagttgagatcacgccattgcattccagcctgggcgacacagcgagactccatctcaaaaaagaaaaagaaaaagaaaaattagtaggccactgaagcagagatgtcaaactggcgggggtaagcctcaaaacaggacccatccgaatgcaaagggaatggtgctttgtaggggtggctgggaagagccgagagactcgccacggaattggtgtgtgggtgaggagaggctgttgaaggtcgggggtgccctgtgtggggggggagaggctgttgaaggtgaggggtgccctcactctgtgggtgaggagatgctgttgaaggtgaggggtgccctcactgtgtggggtgaggggaggctgttgaaggtgaggggtgccctcactgtgtggagggagaggctgttgaaggtgaggggtgccctcactgtgtgtgggggagatgctgttgaaggtgaggggtgccctcactgtgtgtgaccacagaggtttggggaggagttggagcctttgctgagctgacgtggactgctggcagcaggtgcacacattttgaggagctgtggtgagtgcgtcccacgaggcggtcggttccccattcatagccagggaaacggagacccgggggagatggacgaagacattggtgttgggactggatttgatcccaggccccaggctgcagcgtctgtgctttaccagccctgtggggtcctcaccgtcccgtaccaggagactcagagtaccaggggcttcaggtcgtcactgttgccacctctcccccctggtgagaaggacccacgtagcagatggagggcactgttttttaaggttttatctccccacccgcctgcaagagagtgaatgtttgtgacccccccaaattcgggtgctgaaacctaaccccaaggtgatggtgttagaagatggggctattggaagatgattaggtcacgtggggctttgtggatgggatgagtgaagcatccaagagctccctcgcccctccagctaggggaggacatggggagaagacacctccatgaaccaggatgcagccctcgtcagacactggctctgcctggaccttgatctagaacttccagcctccagaactgtgatgacaagtttctgttgtttaggagctgcctagcttatggtattttcattatagcaaccccactggctaaggtactaccctaccctgccccacccccagttctgaagtatggggtaaagggagtgccatccacgggagcagaatagattcgggagaagggccaagtgctgctgtgaaggaagccagcgcttggtggagaccacgtcagacaggcggctgtcattgtcctttcaaagctggtcatttgccagggcaggttgtgggtgtgggttatgcatccgggctgtgctaatgggaactgccagctgaagaagacactgagtccagttttggtcatgatggtgaataatgaaatcattatcactgagttcgattttatttccagttcttgtttattgttagtgaaattccgggatgtggaggtcattgtactttgcttggggaagatgtgaaaatgcatcctttgtagcttttcccagtttagggggtgtcagatgttttctctctctctctccagtcattgtgctttgtgggttttctaccagacattttggtgcaaacaagaaaattaactcaaaatagcttcagcacagaggaatgtggtgccccacacagccggcaggttgaggggctggtgtagtttcaggcgtggctggattctggtgcctgaacgatgccgtcaggattatctcgtgttgttctttctcctctgcctactccctgcacacaccctggccctgctttcttctgtgttaggttcattctggggttcgttcttcccacctggtgaggaagctggccggcagcaactccaaaccatacgaacgttgcctgcgatgccagagtgacgcaggtgacaaggaggcccctcccccgttcagtcagtcattccccaggtgttttaggttgctttttcttttcttttcttttctttttttttttttttaagacgagtcttgctctgtcgcccaggctggagtgcagtggcgcgatctcggctcactgcaagctccgcctcctgggttcacgccattctcctgcctcagcctcccgagtagctgggactacaggtgcccgccaccacacccggctaattttttttttttttgtatttttactagagacggggtttcaccctgttagccaggatggtctcgaactcctgacctcatgatccgcccaccttggcctcccaaagtgctggggttacaggcgtgaaccaccacgcctggtcttttcttttgagacggagtttcactcttttttgcccaggctggagtgcaatggcgcgatcttggctcactgcaacctccgcctcccagcctcagtgactctcctgcctcagcctcctgagtggctgggattacaggcacccgccaccacacccggctaattttgtatttttagtagagttgggctttgaccatgttggccaggctggtctcaaactcctgacctcaggtgatccgcccgcctcggcctcccaaagtgctgggattacaggcgcgagccaccgcgcctggccaggttgttgcgttttctagtttgtccagtgttgatagtcacaaaataagaaagatcttggacattgaaaacaataatttcaaagaagggataaaagttaaaatgagatgaattcccagaatgctgggaaaaagagagagagatgcaaaatcagacaagaaaggtgggaaacaggctcaggaggcccagtatctgattaatcacatcccagaaggagagaacaaattatccaagaaagttccccaaaattgagatttgtgtctccagattgaaaggcccatggagtggtcagcctggccacgaagatccctacagcaaggcccacaaggtgtgcagtttcagagaagcgcctccatgcccaccaggaggaaaaccaggttgcattcagagggtcaagaatgagtttacggccgatctcaaaaggaactctggaatgactgaacgtgtttaagggaaaagcatcttctccctcaattgtatgcctgtccaaacacaaggaagagtgagggcagcctaaagacattttcagacgtgcaaagtctcagatactaccttcttccatgcacctttctcaggaattgaaaagaggagtcagcttaagagagggaaggatggaatccagcagtaagggagtgggggccccagggcaacagtcctcccagtccagatgggagcaggacagaaggtctggaaagatgccccaaagaaagtgaaattcctgaatgtttgcaggtaccgagagcagatttagatagttggggaaaattacagtgatgaattagtaataaatgcagagaaaactgaacaagtaaacaatgagtaaacaacaagtaaacatgaggcaattttttttttgagacaagagtctcactccatcacccaggctggagtgcagttgcacgatctcagctcactgcaacctccgcctgccgggttcaagcgattctcctgcctcagcctcccaagtatctgggactacaggcgcccaccaccatgcctggctagtttttgtatttttagtagagatgaggtttcaccatgttggtcaggctgctctcaaactcctgacctcagatgatccacctgccttgacctcccaaagtgctgggattacaggcatgaaccatcacgcctggtacaatgaggcaatttttaactccagtagaaacaaaaattcgtacatgaaggaaaaataaacattgtataccatatggtggttcagctgtggatggcgtctacctggtgtcattttctgttgctgtaacagaataccacaaactgggtaatttataaagaaaataaatgcatttcttacagttctggaggctgggaagtccaaggttgaggggctgcatctggggagggcctcctgctgcgtcataacctggcagagggcatcgcgcaagcccgtcagctcaggtgtcttcctctccttgtaaggccaccagtaccatcatcagggccccaccctgctgaccctacctaatcctaattacttggcaaaggccccacctccaatcaacatacaaactggaggtttacctttctaacgtgaagtttagcggacacattcaaaccatagcacctggttatgacagtgtagaatggaatatccatctagcttaaaaagcaacaaaactgtacagggagcgtgtgagtgtgtgtgttagagttacaggggtgaggtgtgtcagtgggtacagggagcgtgtgagtgtgtgtgttagagttacaggggtggggtgtgtcagtacagggagcgtgtgagtttgtgtgttagagttacggggtggggtgtgtcagtgagtacagggagcgtgtgagtgtgtgtgttagagttacaggggtggggtgtgtcagtgagtacagggagcatgtgagtgtgtgttagagttacaggggtgagctgtgtcagtgggtacagggagcgtgtgagtgtgtgtgttagagttacaggggtggggtgtgtcagtgagtacagggagcatgtgtgtgtgttagagttacaggggtggggtgtgtcagtgagtacagggagcgtgtgtgtgtgttagagttacaggggtgagctgtgtcagtgggtgagtgtgtgtgttagagttacagggtgagctgtgtcagtgggtacagggagcatgtgagtgtgtgttagagttacaggggtggggtgtgtcagtgggtacagggtgtgtgagtgtgtgtgttttagagtgacggggtggggtgtgtcagtgagtacagggtgtgagtgtgtgtgttagagttacggggtgagctgtgtcagtgggtacagggagcatgtgagtgtgtgttagagttacaggggtggggtgtgtcagtgggtacagggtgtgtgagtgtgtgtgttttagagtgacggggtggggtgtgtcagtgagtacagggtgtgagtgtgtgtgttagagttacggggtgagctgtgtcagtgggtacagggagcatgtgagtgtgtgttagagttacaggggtggggtgtgtcagtgagtacagggagcgtgtgagtgtgtgtgttagagttacaggggtggggtgtgtcagtgagtacagggagcatgtgagtgtgtgttagagttacaggggtggggtgtgtcagttagtacagggagcgtgtgtgtgttagagttacagggtgaagtgtgtcagtgagtacaggatgtgtgtgagagtgtgtgtgttagagttacaggggtgaggtgtgtcagtacagagagcgtgtgagtgtgttagagttacggggtgaagtgtgtcagtgagtacaggatgtgtgactgtgtgtgttagggttacagggttggggtgtgtcagtgagtacagggagcgtgtgagtgtgtgttagagttacgggggtggggtgtgtcagtgagtacaggatgtgtgtgactgtgtgtgttggagttacaggggtggggtgtgtcagtgaccgagagctacattttcatcttctgtagtggaaagtcagtggatgcctaaaactgaaatgtcaggaagtaggaatgtaagtatgttcttcatcaatctggagatgcatagcaaaagaagttattttaaaggattaaaatggggaagggagacaggggttcgggtgggccagggtccaacatcgtggatcgtgacagcacttcagactgtgagcatccatgactccatgaaaacagaaacgaaagatggttttgaaactcgtagggcgcttaaaaagaccatcaggaagccgggcgcggtacctcacacctgtaatcccagcattttgggaggccaaggcgtgcagattacaaggtcaggagttggagaccagcctggccaatatggtaaaacccagtctctactaaaaatacaaaaatgagccgggcgtggtggtgggcgcctataatcccagctactcaggaggctgagacaggagaatcccttgaacccgggaggcggaggttacaatgagctgagatcgcgccactgcactccagcctgggcgacagagtaagactccgtctcaaaaaaaaaaaaaaaaaatcaggaattcttttacatttatgaacacattttaaagttgtttggcccttggctgggcgtggtggctcatgcctataatcctagcactttgggaggccaaggcaggtggattacctgaggtcaggagttcgcaaccaacctggataacatggtaaaaccccgtgtctactaaaagtacacaaattagcttggcttgctggcgtgtgcctgtaattccagctacacgggacgctgaggcacgagaattgcttgaacccggtgggcggaggttgcagtgagcgagatcacgtcactgcactccaggctgggtgagagagcgagactctgtctcaaaaaaaaaaaaaaaaaaaaaaaaagattgttggccctcaaggacaggtcaagaggatactttctaagtcagaggacccagccaagctcaggcagtggattaatctccggaaagacaaatatgagcctctcagcccgtgggggtgagtgtcccttcgtctggagacagacatatcaaagctggagttatctccgcattcgaaaatagattcccaagtgtattcgttcattgcctcgtgcctgccaagggaaaataaatatttccaaaattctctttgaggattgctattatggagcaaatatgtatgttcttttttaatttattgtttgtgtttcacgctcagtgtgttcattgctgacggctgcaggacttggcacatgatggtgccttcccgagagcttagtagggttttaaaggactgtgaagagatttttggtcgtcgctcaaagcgtaatttcacagggcctgaagctcccgcgctggggctagtagaactatctagttggaaggctccagaaaagtgtttttgtctccttttacatttttttttagagacagagtctcactctgtcacccaggctggagtgcagtggcacgatcatagttgactgcagtctccaactcccgggttcaagagatccttccacctcagcctcctgagaagctgggacgacaggtgtgcaccaccatgattggccaatttttttattttttatttttatttttttgagacagagtttcgctcttgttgcccaggctggagtgaaatggtgtgatctcggctcaccacaacctccacctcccaggttcaagcaattctcctgcctcagcctcctgagtagctgggattacaggcacccgccaccacgcccggctaatttcgtatttttagcagagacaaggtttctccatgttggtcaggctgctctcgaactcctgacctcaggtgatccaccccgctcggcctcccaaagtgctgggattacaggcgtgagccaccgcgcccaggccctaatttttaaattttttgtagagatgaggtctcaccatgttgcccaggctggtttcgaattcctgggctcaagcgatcctctcaccttaacctcccaaagaactgggattacaggcgtgagccaccgtgcctggctattttcctttctgtaaaaggactgtttccttgatactcacttggtcacctgggaaaaccacagcagtgtggttttggtctgacagcaatggaggctacgccgcgtgccccactgtggtgaggtcaagctcctggtgctaagatgctgatggtagcagtggcccatctagagtggctgctgccaagatgccggctgcagcggaggcatggctgggcctctcgatccacggatcaggcagcagctccgccttccctgcgtgccgcggcccgctgccctggggcagctctagacgcgggcgtctctgtgctcttggaggcctgggaaggccacccctgccccctgcaggcttagaagtgcctgctccaaatgcctggcctctcctcactccccacgcccgctccagtcgtggagcacagttggggctgagcccaggtgctgctgcagaccatccgggtgggtccacacttggggcagcacggacacaccagcccttgccacctcagccccctcgggactgggcgctgttgaacatgggagggaagctgagggagggctgagggtggctcagtgctggcctgcaggcgccccttggcatgaacaagctgggtgccatgaacagcagtgggaggcagacagacttctgggtggaagggggcaggtccctggtgaagccacaccttgaagcttcaagggggcctggggcccgggctgccagtcctgcagactggaaggaggactcggtgcttttgtcagaggggggatgtgcatgctggttggggtgggctgcctgtggaccaatcagcgtgcacttccccaccctgaagaccacaaaaaccccagactcagagcaacgcggacgtcgggatgaccagctgcggagagctaccctgtctgctgagagctgaacacttgtcaggacgacctgcctgcagagagaagccacccactgtgggtctcccctgagctgttctaacactcagtaaagctcctcctcgtctcgctcaccctccacttgtctgggtacctcattcttcctggatgcaggacaataattcagcagccacagaggtttccagccggaagagcaacatcccaaaggccccatcagtgccccgtcagcgcccatgccaagaagagagagacagacggtgcactcagcgtgcctgctgggctcggtggcaaacgtttggccagctcaggaaagcctcgtactgggtgggtcaggggactgcttggccgctctgtctgagcctcatcacggggcaggtggcgtctgcaaagcgggtgcttcgggcgttctcagtgctgctgtatcttttgtcctctgaatcactctcctctgacggggggagtttgctctggtgttgcttggtctaatctacctggtggcgtgatgggcagtctctgtggacagagtgtggagtttagcaggagacagaggaggatgcgggaagcctggactccatgtctctggggctctggtggcaccacagaaagagcctctggagtccaggaagggggcagggcccggaggaggaagcagagggcaggggacaggctggacacagcagctgtgggagggaggggtgctcgggatctcatggaaggcgctgcacaggtgtgctcagatcaggcaggtgtgccatgcacgtgctcatggctgcatcagtggaaagtggaggacagaggcccagagctgctgcaacgcccaggcctgcctgaagatgtgggcgaccagctgtccaagccaagtgggaggccaccggtggcaccgccactgcacacctcgctctgcccgacaggagaccaggaactcggcacactgcctcctgggatgcaggggggcttgtggccaagtccaagggttctagacccttcgagggggcagaagctgcttgagaaccgtggcctccgcagcctcgcatttttagaggagcctgtttctgggcactcactggctacatcgtgggcttctctggaaggagagctgcagaggccgtgtgctccacgacggtctccagggtgaggtctggtgcgagcctcggcgctgcttctcccctcggcctctcagcggcgcgcttccctttagaattctgattccctattcagccatacttgtcaaagcactcaacatccgatcacagccgagagtgaggccagggcttgtctcttgtaggtttagtgctttgagagatactgtcaagtaaatcctatacatgaaataaatcaagcaaatcccacaaaggctggtcatgtcttgttactaagcagtttgggttcctgtgattgtacgtgtcattgtacctggttttaggaaggcagtgctcctacccggcattctccagccccttaactcaaaccctctctttccatgttctcaatgacagacctggtgctcatccggaagcgctagaagtgaacacaggagatgtttcctaaagaagcagaacactggtgtctggggggtgatgggggcggggaaacatatttttccctttaaaaatatttattggccgggagcagcagctcatgcctgtaatcccagcactttgggaggccgagacaagtggatcacctgaagtcaggagttcaagaccagcctgactgatatgatgaaaccccatctctactaaaaatacaaaaattagctggacgtggcggtgtatgcctgtaattccagctactcaggaggctgaggcaggagaatcacttgaactcaggaggccgaggttgcagtgagccaagattgcaccactgcactccagcctgggcaacaagagcgaaattccatctcaaaaaaaaaaaatgtattgtggccaggcatggtggttcatgcctgtaatcccagcactttgggaggctgaagtgggaggatcacttgagtccaggaggttgaccagcctgggcaacacagcaatgccctgtcaattagccaggtgcggtggcaggtgtggtggcaggtgcggtggcaggtgtggtggcaggtgcggtggcaggtgcggtggcaggtgtggtggcaggtgcagtggtgtgcctatgagcccaggaggtagaggctgcagtcagctgtgattgtgctactgtactagagcctgggcgagggggagaccctgtctcaaaaaagattttttttaagtgtagttttttttttttttttttttttttgttgttgttcttgttgtttgttttgatacagagtctccctctgtcgcccaggctggagcacagtggcacaatctcagttcactgcaacctccgcctcccgggttcaagcaattctcctgcctcagcctccctactagctaggattccaggagcccgccaccacacccggctaatttttgaatttttagtagagatggggtttcatcatattggtcaggctggtcttgaattcctgacctcaagtgatccacccgcctcagcctcccaaagtgctgggatgacaggcgtcagccaccgcatccagcccttaattgtagctttttattttagaagaagtgttccagcatggtggcttatgcctgtaatgccagcactttgggaggctgagccgggcagattgtgtgaacttaggcgtttgagaccagcctgggaaacatagcgaaaccccgtctctacaaaaaaatacaaaaattatctggccctagtggcacatgcccgtagtcccggctactcaggggactgaggtgggaggatcacttgagcctgggctgtggaggctgcagtgagctgtgatcacgccactgcactccagccagggcgacagagagaaactctgtctcaaaaaaaaaaaagaagaagaaaggcattctcgggttttttttttgtttgtttgtttttaacttgaaaaaatagaaatgtggaaagaaggttccagcctacctgtaatctgcaccccagaggtggctgggacgggtgtgcagtcccgtgtccctgcacatgcgtggttcacatgcacatgtacacagctgagagcgggcatcccacgcagcgtcacgtctgtctttactgtactttcctagtgtgatactgggggacgcagtctcagtgtctgcagagccgctgccttagccccgttcccttggaaacagagctgagtcggagctctcaggcctgcaggcttggggaggaggtggggagggaaggaccagcccagacgggggcacacccagcggccacagccccgcggcaaacccaccggcctccaggtcacatgtaggccctgcagtgcctgtcggggagccccctgggccagggtgatgcgagcctgacccccacagaggccaaggcggctgaggacaggaggggcccgggtgcgggagggcgcaggcagggcccctgtgagcttgggcagacacagggagggggtcccatccgcctgccttgtaaacctggaagttgcactgatgagaaacccttttcttccctgaacgtgagacttccagcgtcctgttagctgcagcctcaggcctaagccgtctctaacccttccgcaggcatcgactacaagacgaccaccatcctgctggacgggcggcgggtgaagctgcagctctggtgagtctggaggaggtgcgagcgtcccgcacccccagggagtaacccccctggctggcatagcaccccctgtcagcacagtgccccggggagcacccatcccccaccaccatcggcacagcgcccccgggaacaccctcccaccaccaccgtcggcacagcaccccggggagcaccaccagccccaccaccatcagcacagcaccccggggagcaccctccccccaccaccatcggcccagcaccccagggagcaagctccccccaccaccatctgcccagcaccccagggagcacccttcccccaccaccgtcggcacagcgcccccggggaacaccctcccaccaccaccatcggcacagcaccccagggagcaccctccccccaccaacatcggcacagcaccccggggagcaccctccccccaccaccgtcggcacagcacccccgggaacacccttcccccaccaccgttggcacagcgcccccgggaacaccctcccaccaccaccgtcggcacagcgccccggggagcacccccagccccagctgcaccagggcttctctgaaggaggtggtggtccggttgtctgggcccccgtcatccagagtaggggaccccagaacggacatagcgctgtggctgggaatcggcttttgggatcagaacctgtggcctggtgtctgtgggaagatgccaagaggggaccgatgcagcgtggttgaggcagcccggggctcctgggtcccccacgcctggctcagtgatgccactgagcacccggcagggagctcggagcgtcctggtgccagcggggctgtggtcgggcctgcgggtggaggacccagacgtggggaggtgaggacttgctggccagcctggggctgctggctctgctctctcagctgtgagaaccccagctcctcaccttggggcaagcccggggcacctctccctcccccagcacccccaccttggggccagcttggaacacctctccctccacccgctcttggcttgggatggggggagctcctgcggttccagctctggggcggtggggatggggggctcctgcggtgcctcatcctggggctgcctccctcttgggcatccctcctgcactgctgccactcctgggtgaccctcgcctgagcctcctggcccttcctgcctgctgggccacccccgagccacgtgtgcctccagcagctgggacccccttctcttacctgtccccttcctacgcctgccccgtctagtagtggccagtcctggggagcctgtctccacagtgtccccaagcgccccgacccttcctgctgcacagcttcaggcctcccgcccagtctgctctcaggtccccactcccccggggccatgccctcgctgggctggcgttggggttgccgtcagcccctgtcctgctccccaccctccgccagctgggcctttgctgcctcctcctggccctgagccctgcaggtccaggaccttgttctcaagtctctccctccctccccgagaccactccttcctgaggggccaaggccacccaaaggccgcactcggccccacgcctgcccctgagctcagtgccttcctaaagatctgcttgcatcagggctggcgcgtgccctctcccagctccaccccgggtctggctgctcaccttagcgaacgcctccctgaccccagctgcccagtgggccgaacagtcaccctcacacttttctccctctcacctcaggagtgagatcccagggggcttctgccaagctcagaatccccccaggccccagcaggaccctgaggctgctctcctgtggtgccggtgccagctctgtccacactgtcgtctgagcaaggtcacactcccaccgtggaccccggagtgtggaccccagagtgtggtccttcctggtgcccacaactgggtcttctgcctgcccccacctgccctcacctccctccccacacccactggggctggggttgggctctgctctgctccttcagggtggcagcggcccaggaggccggcacgttgtcccagctgaggagggagtgctcccacttcacgatggggcactctgacagcacgtgctggcccttcggcctccctgcgaagctggcagattgacctggcccgctgcctcctcgaccatagcttttgggcagctcccgctgtgtgcaaagcctgagcacctgaggtcctgctgaggcttgaattctagatcaatttgcttctcaggaaatgaggcactcactcctaggctttggcaatggccagtgtcgctggtcccctctggagccccaggcccttctctctcgtgctgagggtggtcaccgaccacaggtgcatgtgacacaaacagcaaaaccatgccgcgtcccaccgctcatccgtgaggttgtgtctcgtgtgcggggccagcccctggcccactggggaatctcccattgatgtaggtgtgttcgttgcatgtgcagactccgggaaacagcgctggctgtcccagggccgcctcctctgggaactgatccctggggagcaccctttccaccctcatttgtttcttcctttttttttttttttttttttctgagacagagtctcactctgtctcccaggctggagtgcagtggcacgatatcagctcactgcaacctccgcctgccgggctcaaacaattctcctgcctcagccttccgagtagctgggactacaggagcacaccaccatgtccagctaatttttgtatttttagtagagacggggtttcactatgttggccaggctggtctccaactcctgacctcgggtgatccgcctgcctcggtctcccaaagcgctgggattatcggtgtgagccgccaagcccggcctttcatttgtttcttggagctccgttctggtctttgtgggtcccagtacctgctgcgtgtgccgtcatctgagaactcaagccctgcctgcagctcacgccaggcagttccctgtatccctcccctcttaggggcacactggaagggctgactccatgtgagctcttacagttgaactggaagagcagggatcccaccggcctctctcccctggtgtagacccacactccttactgcatagatttatcttcagattcaacaagttttttaaagcctacattgaatgtatttaaatatctgagaattatgttaaaaccgtcactattttttctagtttgactttttaaatgacagagaagagcatgagcctgggaggacatcccaacacccggatcccttcagggacattggaaagttttgttggggtctcacgctggcggcgtggtggctgctgactggcgggtgtgtggtgcacttgctgtggctctgaagttccagaacctgttgtcaggaagaagcactggtttcttcttaatggtctccaacatcttttccagggatacttcaggccagggaagattttgtaccatattccgctcctactcccggggcgcacaggtaacacagcatcccccgagctgggagatcaaaccaactttgaataataacatttacaatgcttaacttaccatcctttaatggatgattggaggacaaggcggttaagcttacgtataaattggtgctgagagtctaaaaacgtgctgtagagtggttggttgtttgaaagacttcatcagtattacggatgtaagcgtgcatttacgggactgtgtgtgcatgtacacgtgtgtgcaggtacgtgcactgtgtatgcgtgcatctgtgcatgagtgcctgtgtgtgtgtgtgtgtgtacatgtgtgtgcaggtacgtgcactgtgcatacgtctgcatgagtgcctgtgcgtgtgtgtgtgcacgtgtgtgcaggtatgtgcagtgtatgtgtgcatctgggcatgagtgcctgtgcgtgtgtgtgtgtacacgtgtgtgtaggtatgtgcactgtgtatgcatctgtgcatgagtgcctgcatgtgcgtgtatgtgtacacgtgtgcaggtacttgcactgtgtatgcgtgcatctgcatgagtgcctgtgcgtgtgtttacacgtgtgtgaaggtacatgccctgtgtatgcgtgcatctgtgcatgagtgcctgtgcgtgtgtgtgtgtacacgtgcgtgcaggtacgtgccctgtgtatgagtctgtgcatgagtgcctgcttgtgtgtgtaatgtgtacgtgtgtgcttgcctgtttatgtgcatgcatgtgcacacatgaactgcgtgtgtgcactgtgtgtgcatctgtgcatgagtgcctatgtgtatgtgtatgcaacatgtgtgcaggtatgcactgtgtgcgtctgtgcatgagtacacgtgtgtacacgtgtgcaggtatgtgcactgtgtctgtgcatgagtgcctgcgtgtgtgtatgcaacatgtgtgcaggtacgtgcactgtgtgtgcgtgcatctgtgcacaagtgcctgtgtgtgcgtgagctccatgtgtatgtgcacgtgtatgcgtgcaatccatccaggtgagtgggccacactcctcgagaggtggcgattactgcggtgcccctgcatcctgtgttcctggagtggctcgtgggtgtgagttctagtccccagatcaccgtgacatttgagggtttatcactgagcttatgaaatatcactgaaaatgatcataaaactgctacattcagttgataaatcaaaattatgtactttgtgttaaaataaggaaagtggttatttagttgtatgtctttgcgtgcatggccacagctgtgcctgcatctgtgttctgcgtgctgagcctgtgacctctcccccagggtgtgatcctggtctatgacattgcgaaccgctggtcttttgacggcattgatcgatggattaaggagatcgatgaggtatgttgtagaaatgccactgcccaagatccctgtaggcttgggaggacgtcaggccaggaattagggccgggccctccagggctcatgggtacccatggatcacaggccagggcaccggatggcgctccagcaggaaggagggtgcctcacctcggcacaacactggatagggctttggtgatagctacaatcacgaaagctcaggaagctggtccagacgaaacgagcgtccacggcgtacctcggctatgcgtggggtcaggtttggcctgcttcactccctgctgtggtcgggctgggctgaccagcagtgaccggcgcttgtgcctgctggcacgcagaccagcccgcctggcaatggtgacatggcgtggtcgacactaagcccactgtatgagtgtcccggggctgctagaaccgacgaccacaacctgggcgtcctgaacaacagaaatgcattctctcacggttctggaggccagagcccaaaaccaaggtgtcggcagggccacttccctacagccgcctctcccagctctcggcggtgccagcaaccctgggccctccctggcttgtggctgcaccgctccagcctctgccttcgcgtaacatggcctcctccgagtgtctgtgtcttctcttctcccaaggacaccagtcattagatgagggccctaattcagtgcggccgcaccgtaactatttacgtctgcaaagacggtctttccaaacgaggtcccatgctgaggttctgggtggacatgaactcgtggggggttcctcgacccagagcacccacattacgacgacaacaaaatctcactgaagtaacccatgctcctcgcctttctcctgcccgctagcatgcccccggagtccccaagatcctggtggggaaccgcctgcacctggcgttcaagcggcaggtgcccacggagcaggcccaggcctacgccgagcgcctgggcgtgaccttctttgaggtcagccctctgtgcaatttcaacatcacagagtcgttcacggagctggccaggatcgtgctgctgcggcatgggatggaccggctctggcggccgagcaagggtaggcccaggggctattccgggggccacctctgccctccagatgccgaggtgggtcagcggccccctggataagtgtctgcctcccgggacccgtctcaaggccactgtgtccgttctcagagcaaggcatttgagagaagtaatgactacagctttgtcagaaagctcatgagggagctcctgggatctgtacgtgggcagaggggacgtcgcggcagggcttgctgcatgtacaagccagggccacgggcgtccgagccttgggagggcgggagaacaggtgtgggcaccacccctcattcccagcccaggtggggacatccactaagcaaggtttatcttttctctcccaagtgctgagcttgcaagacctctgctgccgggcggtcgtgtcctgcacgccggtgcacctggtggacaagctcccgctccccattgccttaagaagccacctcaagtccttctcgatggccaacggcctgaatgccaggatgatgcacggcggttcctactccctcaccaccagctccacccacaaaaggagcagcctccgcaaagtgaagctcgtccgccccccccagagcccccccaaaaactgcaccagaaacagctgcaaaatttcttaaggaaggcactgaaagaaacacggcggaatctctccaggagaagctcggcgttacccccggcagctggtggatgcatctcagatcccggttcctctcggcgaatgctgcttgcgaatgtgtgcgacgccttccgtgtgatggaaacacactaccccgtcggacttcgaatttctacgtggatgtgcatgaagctcttgttttcgatgtgtgtttgtaaagggaaaattagtactctgctcgactcttggtaacatgaaattctgaatgttactttatcatgattgcactgcaactttttccttaaaataactgcttttgtaagaacggtgatattggagtgattagtataaattcaatggaatttgagaagcaatggcagcgggataatttagagtcactgatattacgagaggggtctttttgtaaacctccttttcaatgtcaaagcgccaatttataaaacgctgcagatgtagaggttatgtgcaactgatctgtccagtttgtgtatgaaatggatttgataaagtttttgctagttatttactacattttgggattaataagtgatttatatgcatatttttctgtaaatctacagttttttgtacaagatattctacaagttatgaagctaagggaagaaaatgccaaagatacctctagttatgttgaacacagccagcacagtttcgacatgtcaaggaagagctgtttcagtaaagaatgaagtgaaaacacttatttaggaaaatgtttctcaacaataaaatgtatagttgtttctctcttggtagagttggcgaccggttctttcgaattttgtatttatttatttatttatttttgagacagagtttcgctcttgttgcccagggtggagtacaatggcacgatctgggctcaccacaacctccgcctcccgggttcaagcgattctcctgcctcagcctcccgagtagctgggattacagaggtgcaccaccacgcccggctaatttttgtatttttagtagagatggggtttcaccatgttggtcaggctggtgttgaactcctaacctcaggtgatccacccaccttggcctcccaaagtgctgggattacaggcgtgagccactgcgcccggccagattttgtgtatttcttatagccctttacttcactgcgccactgcctggtgtagacatcacatatcggagctaatacacgacactggcaacaaggctgaatccttgaactgttgtcgcctgttgagaaaggattccttttccggaacagaagtgcagaggaggagagagcggagagttaaaagctggcacccaggcatgtgcctgtctgagaaatcagagccgtgctcctgagcctcggtgaggagctccgaggggctgtcaggaattccgcatgaagatgtagcccctgaccccgactgcctcagagcagggctgaccgcaaagacctccagggccgctctcttccctggtcacactgttgaacgtttctctgtggctgggggtcgcaaatgagggactaaaccaaaaaaacgaagcgagaaaatacccagatgttcctagttcctgctgatgatctgtagattcttagaaacttaagggacccagctgggtgtgatggctcacacctgtaatcccagcacttcaggaggccgaggcagccggatcagaggtcaggagttcaagaccagtctggccaacgtgatgaaaccccgtctctaataaaattacaaaaattggcttggcatggcagcgcacacctgtaatcccagctactcaggaggctgaagcaggagaatcacttgaacctgggaggcaggggttgcagtgagccgagatcgtaccactgcaccccagcctgggcgacaagtgaaactccatctaaaaaaaaaaaaaaaaaagaaatttaagggaccctagaatcaggggcaaagcctgtattcagagatggtggaaccgaggcccagacaggagagaggagcactggtccctgcgggtggacccaggcttgggggtgtctggccacctgggcacggcagccacggggacaaagtccacggggaggcaggggtgtggtctgtgggcagaaggtgaaccctgaggggacagtgtctggagagggtggccagcctcgtgcaggcacgctgcaaagacctgtgcacccttctctctgctgtgccacaggtggggtgagaacgacagggccgacctcccagctgcaaacacaaggacactgagatgcacagaaaggagagtccacgttgaagaaacccacgttgaggggcctcttctccctccgttcccagctcgctgatggtgaagggtaaggaaatggatcctcccattgcaacattaaaccaggccaaacctgtatttttctcttccttcctttttcttgttttgtaattgatgtctcctcgggactactgataatgtcctagaaagaataaaataaagtttcccaaggctttgtgactcagagctctttggaggtgttcaccgaatgcacgggccgcccggaggccttggccctccagggaaacaccaccagaagtccccagaagcggaacatgtagcaaggaggctccccgagatctcccagagggagcacagccctgccaagttattggttttggacttccggcttccagagctacgagaaaataaatatttgttatttaagtcaccaggtttgtggcgattgttacggcagcctcaggaaactcctacaaggaagtgagttacgctcacggcagaaagtgctacagcaaaccaaggcagaacaaaaacagacgaaacctaatacagaccggactaagtagaagactgtgtgtttgggtggtgaatatacaaaaaacataaatataaattaaacctta

SEQ ID NO: 7 - DNA, 119449 bp, Homo sapiens
  source 1..119449: mol_type = other DNA
gcgcgtgcgcgcgcccggccggccgtcgccgcggtgaccgtcctcggagtccgtcggctcgcgccccgcccccgtcgccccctcccctgtcgcgcgctggggctgtttctcgctccttccgagttaccgccgccgtcgccgccgctcctcctctcccggtcctgggtttccttggcgctgcggccgccgctccctctgcgacctgtatgaggaggaggaggaggaggatgtgaagatggcggagctgcagatgctgctggaagaggaaatcccggggggccgccgggccctcttcgacagctacacaaatctggaacgggtggccgattactgcgagaacaactacatacaggtgcgaagcatccccagctgggccgcgtcggggacccccccgccgggggccgcgcgcctcggggcgtggggccgaggccgcctcggggacacggcccagcggagcccccgatgggggtggggagctgggtgagggctggggctggtgaatgggtgggaattctccggctggagaaactgcattttaaaaacctttaaaaaagcggtgaagcagttctcggcgtggtgcgtgtgtcgcgtcccgcctcctcgccgctcccgccctcggccgcccccgcactccgcgccggtcagcgttccggatggcggagggggcggagagtggcattttctgtttgacggaatcctgctccccaccttagggtaggggtgtcgcgggtgttgacgggttacctccatcccccaaattctggatgatttttaaggggttatcttgctgcagagtgaagtgcttcaggcttcagttttctgttcctgtgaatgcttcagaaaccctttcttaatattttatgttctaaaggggatacggtagaagagcagcagtttcttgttggaagttaatgccatttttttccctatggagaaggatgatgagctgattcccccctccctcctagttctgttagaataggcagttttcctgggggtgggaggaggacagactatgactgtttcttagagagaattgggaagatgaacctcctggtttaattttttttttttttttttttttttaccgtgatggatcgtttggctcaagggctgatagtggtaggggcgtgtgtatggaggcgggggataccggatggtatgagatccagctgctcctggatgaagcaaaatattctgtggattaaaaaaatccttctttaaaaattacttgaaaggatagcaggttaaaaggcacagtttgcaaaatctaaaatcttttgcttttttttttatggttattttgaattatgggttctgcctccattttttttctttcccgtttaaattctcttgggataaagatggaaatggaagcaatatgttaaactgtttcttcacagtctttttttttttccttttttcttgctcccacctccatctctccagggatccttcttttttcttttctttttgagacacaacctcgttctgtagtccaggttggagtgcagtggcgcgatctcggctcactgaaacctcggcctcctaggtttgagcaattctcatgcttcagcttcccgagtagctgggactacaggcgcccgccaccacagccggctaatttttgtatttttagtaaagatggggtttcaccatgttgaccagactggtctcgaactcctgacttcaagtcatccacccacctcggcctcccaaagtgctgggattataggcgtgaggcacctttcttaacattagctatataggaaagcattttcatgtcttagtgtaaattttaaaaaacaggtgttacaattttataggttcataaattttgtaatggccacattgttgatcgcggaagtgagattttgtttgattagacatactgttatcttgtagacaacatttgtatttgagaatgacccgaaccactgtataaacctgttccttcgaaagaggcagttgactatggctactaggaaaggaatgtaggcaagattaatacaaaaaaatacaaatgtccacttgtaatgtactttgctgatacaagtggggtagaaaagattcagaggttcaggcctgggcgataagagtgagactacatatcaaaaaaaaaaaaaaaaaaagattcacttgctcaatttttcgctaaaattgaaagtcttttatggcctagaactgtgtgaggggtggatggtacatacctagtaggagaggctgatcttggaggaaattaataccatgtagttaatttatactctgtagtgcactgctggtaccaaggaggactggaggaagcaatgctgttctgagggatttcacaatctctagtagaggcaaaacctaaaggaatgaagtggtaattccattgccttgtgcagcatattatggggaaagagttgcaggtcagaagagaaactgagggtggaaaagtggattgcaattattaccagtaagaaataaaaaataaacagatttctctctcttttgcaagatgatttcttattgtaatttgaaggtacaagttcctcttaagttataattgctatataaaggtaaaaggataaggattattaaagctgaaaggttaaaggcatcagcagttttctttttaaatattttatacatttccttcagttgaaaagagaaaaacgttactactatcaatctctgttttagcaatgggactcaaaatttagtgtggtgacattttaaaatttaaagcataaatattgattaatattaatttaatagaaatgaacttagattttaaaatagtttatttcttcagtttagcatctgaagtatattttacactttctcttttttgattatcatttattttaggatgccttaggtatataattggtacactctcaggatgatagctcttatatgatttgttgatttgttgggaaagttgataaatagaacgtggtgacagtggatttgtgctgatccagctgtacatttggttgaccagcaggggttttgatgctgcctggaccctgcagtagatgaaagttaattcacaggatcagtgatcaaatggtcaatttagccttttttttttttttttttttctgagacagagtctcactctgtcgcccaggctagagtgtagtggcgcgatctcgatctctgctcactgcaacctccgcctcctgggttcaagcgattcttctgcctcagccttccaagtagctgggactacaggtgtgtaccaccatgcctggctaatttttgtatttttagtagagacgggatttccccattttggccaggctggtctggaactcctggcctcagatgatcgacctgccttggcctccccaaagtgttgggattacaggcgtgagccaccgcacctggccaatttagccttattatagcatcatgtcttagccactagctcgagttaactaacccaacactcattttattgtgtggaaatgtaatttttgcctataaagtagaaaaaaatctgtttatcatgtgtaataagtgtttttgctcagtgttctttttttttttttttttttgacacagagtttcactctgtcgcccaggctggagtgcagtggcgcgatctcagctcactgcaaccttcgtcccccgggttcaagtgattgtcctgcctcagcctcccgagtagctgggattacaggcacgtgccaacacgcccagctaatttttgtatttttggtagagatggggttttgccatgttggccaggctagtctcaaactcctgaccccagatgacccacccacctcggcctcccaaagtgctaggattacaggcgtgagccaccgtgcctggccccctaagagtcatttttaataaaaatttagatagtttcattattctaacctctagaaaatgggatagtcaatattttttctaaaatatgataaacaggtataactacagtttgctgatatttatcagatcaattttatttcttgcctatacaaaggatttagtagttggtagagacttttttttgagatacatgtaagacctgcgtttttcttcatttattaatatacacacctaggccgggcacggtggcccacgcctgtaatcccagcactttgggaggccgaggcaggcacatcacgagatcaggagatccagaccatcctggccaacatggtgaaaccgcgtatctactaaaaatacaaaaattagctggctatggtggcgtgtgcctgtagtcccagctacttgggaggctgagatgggagaatcacttgaacctgggaagcggaggttgcagtgagccaagatcatgccattgcactccagcctgggcgacagagcaagactctgtctcaaaaaaacaaaaattacacatataatgcctaatatgtttgaaggtgtccaggaattaaaaatgttttggttaacttggaatctacgtttttacaaatagaagaatttttattacaatatagttgtcttaatgttttggtagatgaaataactccctatttgttacttccctgaaatctgaaaagccaacttgttgatatgtacgtttttctttttgttagataaaagttactgatttttgtgagtgacagttcacatagatgcatagtaaaatcttattgtttggattaagagtagaatcatcccataatatggatttattcaaaagagaagaaattaagaacttaccttaaatttttacctgaaatatttttgaacaataggagacatattagtagctttccttttcttctcttaatcaatgtggatactcccagagttcactaaaaacttcatgagaggtttacaagggaatattatcagtcagtttcatcaaaagtaattaccaaaatgatacaaagatttaaaatttttatttaataaaaatcattagaatacatgctcattgttgaaaaattattggagaatacaagtaggtattatgaaagaaatggaaaattgcccgatcatcttgaatatatatctggtactcatacttttaaatattttttgtatgcacaactatatatcaatatttttgtagaaatgggtttatgttctatattctgtacctttaaaagaaccttttaaggatgctgggcttgacttttttttaaatggatgtcatatactatattgggaggaggttggttatatttataggtcgagttctgtatgttcttgcaaatgggagaatcttagaatacctagaatgaaggagaaagaggtcagttgagagtaaggagactgagtagaatttgggagactgaattccccatagattaagatgactcaactcatttgaaattgatcaaggcttaccattcctcaagaaattagtccctaactctcagcagagacatttggtgaatagattttcagtgacaaatcagtcatcttcaagacctttgacaagattgcaaaaacaggctaatttatatttgagccccttgctcttttaaacattttgtcatttgtacacttcctacaccttcttgtccaaggaacttaagtgacctcataatttccgttattgatccaggaaatccagtctcacctcatttcacccttccttgaagagcttcctggttcaaaattgctctttaccaaaataattaattaataaactgttcatttattttttcttttcttttttctttctttttttttttttttgagatggagtctcactcctttgcccaggttagagtgcagtggcgtgatcttcgctcactacaacctccggctcctgggttcaagcaattctcctgcttcagcctcctgagtagttgggactacaggcatgtgtcagcatacccagctaatttttgtatttttagtaaagacagggtttctccatgttggccaggctggtctcgaattcctgacctcaagtgatccacccgccttggccttccacagtgctgggattacaggtgtgagccatcgtgcccagcctcatttactttttcttcttaccttggtatgggtaatgtgagaatgtatgataggtttactttatttagagtcatcttttctcacccagagaataatatataaaccaaattggtttacttatgtgtaaaatatgtagtagagatatttttgagcatgaggtgcttttggtgttactttttcttttaaaatgcagggaatttaatagtatgcagtttcagggtgtgtaaggtaatcttttggtggatgaaatatatttggtggatgaatatgctgtgatttgcttacacccaccccaaatccattttgcagcaccctactcactgtccagagattctgggaaaaaaacaatagagaagacaaagccagtctagacaccatttgactctaccttgtgaatattctgaaagttacattaggctagttgtagattttttttttttttgagacagagtctctgtcgcccaggctggagtacagtggtgcgatctcagcttactgcaacctctgcctcctgggttcaagcaattctcctgtctcagcttcctgagtagctgggattacaggtgcacgccaccacgcctggctaatttttgtatttttagtagagacggggtttcaccgtattggccaggctggtctcgagatcctgaccttaggtgatccgcccgcctcggcctcccaaagtgctgggattacagcgtaagccaccgtgcctggcctagttgtagacttttgatagcttatggttgaatttttatgggattggttaatagattggattcatgaggtagcatgtagggcaacacattctattttggatttttcatttactttgtgtttccttccagatacgaagctcctagaagatggagtcatttcttaaaaatttctatattttcccattagccgtaggatgttctccatatactagccactcattaaatagttgctgaatgtaagaaatacagacttgaatatgcaagagcctatgcactgaattatttttattttattactttattttattttattttttgagacagggtctcactctgtcactcaggctggagtgtagtagcacgattatgggtcactgcagcttgcactcccaagctcaaacagtcttcacacttcagctcccaaagtagctgggactacaggcttgtgccaccatgcccagctaattttttttgttgttgttgttagaaatgggatctcactatgttgctccggctggtcttggaacacctgggctcaagcaattctcctgccttggcttcccaaagtgctgggattacacctgtcagccgccatgcctggccttgaattattttataagtaggatataattacatgtaaatttaccttgcaagttttttcctatttgattttttggtgacatttatgttctgtaaagttttgcagtacttttcatatttgcataattcatgcaaggaacatagttttgcttttttcttcttaagtaatatactttgtagaaaatttggatgaggtaacagctttgttttgaatcatttacaacatgaattttttctcatttgatttttaaagtcaggtttattgagttttaatacatatatggtacaagtcaccctttttaggtgtaaaggtttatgaattacaataaacttacatagtcatgtaaccaccacaatgtaaaattttccttgtaccctctgtagtcagtcctgtccctccactactagcctttggtaaacactgatatattttctgtccctctagtttttgccttttccagaatgccatataaggggcattatgtagtatatagccttttgtgtttgacttcttggtactagaagtcctaatacatttgaaaatcatcagtgttattgtgttttgtcagtactttgttccttcttattactgagtaatattctagagtatgaaagaatcataatttgttcatccattcaccaactgatggatttctggattgtttctagttttaggcagtggtgaatatggctgtaaacatttgtatacaggtgttggtgcaacctaagtcttcactcttttgggtaaatttaagggaaaagatcaactgttgtaccctggtaacagtggatgtatccacataggctgcataggccagtgcttgaactgcatctgatctgaatcttggccgagcactttgtgatcctcttggaatataagattatggaagtttgcgaggaccttatgtgaagccctttctcaatctcttcatctgccgaggaggctgtacgtgataacagtgcctcatcacctcctagttcccatgagatgaggctctctattgtacccttttaggtagtagctgcaggctgtaagactttagttgcagcatggcattggctcctccgcaacagagtgtcatatctatgttgtagtcacctggctccttttgttttagtattgctttacacaagggctgtatcttttactactattccttctgccctccatgtaaatggtaggctttctgaacctaacaagcagttgggcaggtctatcacattgccttctctttgccttgacaataaatatctaatagtgggattattaccgtatggtaaatgtgtgtttagttttatacaaattgccaaactcttttccaaaaacgatggtaccgttttgcgttcccaccagcaaagatccagttgttcttcatctttgtcagcatttggttttgtcaggttttaaaattttagctattctcttgttagtgatgtctcaaaggccatatatgacaagcctacaactaacatcatactcaaccatgaaaagttgaaaccttttcctctaagatcaggaataagacagtggtgcccagtgtcactagttctatttaatcaagtactgcaaagtactagaagtcctagccagccagttaggaaagaaaaataaacaaaaggcatcaaaattggaagaagttaaattgtctctgtttgcaaatgacatgattccttatgtatacaaaaccctaaagactccaccaaaagactgttagaattaattaacgaatttagtaaagttgtaggagacaagatcaacatacaaaaatctgttgtgtttctacatattaactacaaacgatctgaaaaattaagaaaacatttccatttataacagcagaaagaatagaatacttaggaataaatgtaatcaaggaggtgaaaggtctgtacactaaaaactataagacatttatgaaagtaattgaagaacatgcaaataaatgggaagatatcccgtgctcatgaattggtagatttgatattgttaacatgtccatactacacaaagccatctacagatttaatgcaatctctatcaatattccaatggtatttttcacaaaaatagaaaaaccctaaaattcataggaaaccacaaaatactttgaatagccaaagcagttttgaataagaacaaagttggaggtatcatacttcctgatttcaaactatattacaaagctataggcctggcatggtggttcatgcttgttatcccagcagtttgggaggcctaggtagccagatcacctgaggtcaggagttcaagaccagcctggccagcgtggagaaacctcatctctactaaaaatacaaaaattatagggcatgctggcacacgcctgtagtcccagctactcaggaggctgagttgggagaatcgcttgaacccaggaagtggaggttgcagtgagctgagatcatgccactgcactccatcctgggcaacagagcgagactctgtctcaaaaaaagctatagtaatcaaaacagtgtgttactggcataaaagacatgtagactaatggaacagaatggagcccggaaatgtagccacatctgtgcagtcaactaagctttgataaaggcaccaggtacacaatggggaaaggataattcagtaaatggtattgggaaaactatatccacatgcaaaagaatgaaatttgattgttatatcacacatacaaattagctagaaatggattaaagacttaaatgtaagatctgaaattataaaactctttggtatgggtcagatgtttgttcccttcaaatctcttgttgaaatgtgattcccagtgttggaggtgggtcttggtgggagataattggattatgggggcagatccctcatgaatgatgtagcaccatccctttagtgataagtgagttcttgcttggttcacgtgagaactggttgtttaaaattagtctgggagcccccccaccatgtgacatgctggctccacttctgccatgattacacctcaccagaagtacgtgccagcactgtgctttgtgtaaagcctgcagaaccaagagccgattaaacctcttttctttataaattacccagcctcaggtattccttcatacgatcataagaatggactgatacactcctagaagaaaacataggggaaaaagctccttgattctggtcttgacaatggtttttataaatatgacaccaaaagcacaggcaacaaaagcaagaaaagatgagagtgactacatcaaactaaaaggcttctgcacagcaaaggacacaaaatgaaaaggcaatttatggaatgggagaaaatgtgcaaaccatacatctatctgataaggggtttatatctgtgtgtgtgtgtgtgtgtgtatatgtatatatatatatatatatatatatataaatatatatatatatatataaatatatatatatatatatatatataaaggattcatacaacttaatagcaaaaaaccaaataaccagattttaaaaagacctaagtagacattttttcaaagaagacacacaggcgtccaacaggtatgtgaaaatgtgctcaacatcactaatcattagggaaatgcaagtcaaaacaaaaaggagctgtcacctcacacttgttagggtggctatcaaaagagagataagtgttggcaagcaggtggagaaaagagaatccttgtgtgcagtgagaatgtaaattggaacagccattatgaaaaactggttccggccgggtgtggtggctcatgcctgtaatcccagcactttgggaggccgaggcaggcagattacctgaggtcaggagttgaagaccagcctggccaatatggtgaaaccctgtttctcctaaaaataaaaaaattagctgggtgtggttggcgggtgtctgcagtcctagctactccagaggctgaagcaggagaattgcttgaacccgggaggcagaggttgcagtgagccgagattgcgccactgcactccagcctgggcaacagagcaagactccgtctcaaaaaaaaaaaaaaaaagaaaaagaaaaaaagaaaacccagttctccctaaaattaaaaataggacaaacatacaatcccacttctgggtatatatccctagggaatgaaatcattatctcaaagagacatctgcacacccatgttcatttcagcattattcatggtaactaagatatggaaacaacctaagtgtcagtggatgaatggatgaagaaaatgtgtactgcatgcacagttctccttcagtctacatggggcattggttctaggacccccaagtatacccaaatctgcatatactcaaatcctgcagtcacccttgtggaacgcgtgtatatgaaaagtcatctgtcccatctgtatatgtggatgaatactgtatttgtttgaaaataatctgtatattggacccacacagttaaagggtcaactgcatatgtaatagaatattattcagccataaaaagaaggaaaccctgctatttgtgacaacatggatgaacctggagaacattaggtaagtgaaataagccaggcacagaaagacaaataccgtatgatttcacttatatgaggaatctaaaaagatgaacccatagaatgaagcagataatagaatctgcttctattatcggccaagggccgttgggaggtggggagaaatggggagatgttagtcacagggcacaaacttgtagttataggatgaatgtgttttgggggtctaatgtactgtgtagtaactatagttaataatattgtatacttgaaatttactaagtcagtagatttttttttttttgagacagcgtcttgttctgttacccaggctggagtacagtggcatgatcacggctcactgcagcctcacctccccaggctcaagtgatgctcccaccttagccttccgaatagctgggactacatgtgtgtaccaccacacatggctaatttttgtagtgacggggtttcgccctgttgcccaggctggtctcgaactcctgggctctacccatccacccaccttggcctcccaaagtgctgggattacaggtgtgagctaccatttgcctggctgagagtagattttaagtgttgcccactccccgctcccaccaaagataatcaagaaatgattatcttgattgtgataaccattttacagtttatgtgtgtatcatgtcatcatgttgtacactttaaatatatacagtttttgtcagttatacctcagcaaagctgaaaaaaaaaacccaaagcaaactgaaccaaaacaatattgcctgcaagccacaaacaatcagcatctagccttgacatcatctcctgttacactcctttacccttctttgttcactcaacttcagccactttggcatccttttcttgaacataccaggcatacttctgcctcagggcctttttgctttgtatttgttatgccctctgccaggagtactctactccaagatagttgcatgattggttcttttacttccttcaagcttttgctgatacatcacgttcttgatgaccccttcctggctactctgtgtaaaattataacatactcctgccccttgctcactctccctttgcttatacttatccttccatgctttttttacgcctacatattttctcttaacatacagtgtttcttatttatttgtgtgttttccctccctggtatgtgagggcagagatttttgtctcttactcatttccagtacctggaacagtgcctggcacaaaataggcactccgtaaatattcgctaaatgagcgaattagatcttttctagtaagcattagaaaatgtcggagggcagtgaaataaattagttttgggccaggctcagtggctcactcctataatcctagcactttgggaggctgaggcaggcagacttcctgagctcaggagtttgagaccaccttggccaagatggcgaaaccccatctctactaaaaacaaaaaaatttctccgggcttgttggtgtgcaccagtagtgcctcgggaggctgaggcacgagagttgcttgaacccgggtggcagaggttacagtgagcctagattgcaccactgcactccagcctgggcaacagagcgagactccatctcaaaaaaaaacaaaagaaattagttttgcaaatttgaagagttgatagatttatgctctggaaaatgaaagttggcaaatactttttatttgtccagaatatttaatgtagatatggccaacagaattgacactaatattccacatgtggttggtgctttagggttaagcagtttatttacagttacttagtgcaggacttactcaatagtggaagctcatcaaatgtctgaactgatctacagcttcctgggaggtataagcaagggagatattcctattataacatattagatgagacaactcaagtttacctctgactctgctaaactaaaattctgtgaagagaggaattatgttcattttttttttgcctgttatgtcctcatttcttagtgttcagtaaatttttgttgagtaaaatgaacttatgactcacaccatttattttattatatgtttttttccttcctggtcgttcaaaaatagttattgagcatctttccattctgtgaggtcagtggtaagtaactcatggaccaagtccagttctgttaccattttgatttctatgaagaatcttcgttgtaaattttgaattaatggagttgaactgcatataatatgggactgtttttttgtttttcttgatgttatgtggccttacccacttatgtgttgaaggcttttcataaaggcaaggagataggttgttaggaacctacgaaacaaagttgaataggggaagccaacaagggatgccagcatctttcaatatgtagtaccacaagttttctgccagcagatagtgcttaaatagtgattccatgtctccctcaaaaccttttatttatttatttatttatttatttatttatttatttatttttgagacaaggtctcactctgtcatccaggctggagtgcagtggcgtgatctcagctcactgcagcctctgcctcctggtctcaggcactccttctgcctcagcctccttagtactactgctgggattacaggtgctcgccaccatgcctggctaatcgccctcaaaaccttttattctgaatctagaagagcaggctaggttgacaaaaatatttaaattgcctggcttgatataatgtctatacacacacacatctcattgtttttgagagaaaaggaagtttaaatttatggacatgaaatttatattatttctagttttttaatcattcatgcatttgtttataatgcattaacatgcataattatgaattttattcatgtgtaaataatacagtctataccgttaacaaaagaccatgagatctgtggaagaagaaaaaggagaactttatttcctatagaggattacagcctgcagattgggaagtggagcctccagccaaaactaaaagcaagcacctggggaggctgaggcaggtggatcacgtgaggtcaggagtttgagaccagcctggccaacatggtgaaaccttgtctctactaaaaatacaaaaattagcgggatgtggtggcacgcatctgtagtcccagctactcgggaggttgaagcaggagaatcgcatgaactcgggaagcggaggttgcagttagctgagattgcggcactgcactctagcctggacgacagcgagactatgtctcaaaaaacataaaaaaatttaatgttagcaggttagtttgtggtacaaacatgttatgtgcatgtaatgacaaggcattatattccaggtttttttttccttcttttgaaatgagtgattaaagatagaatttctaggactatttatttatttttgaaatagagatggggttgctcagggtgatctccaactcctgacctcaaagacatcctcctgcttgggcctcccaaagtgttgagattacaagtgtgagccactatgcccagcacttcagagttattaatgaggtttaaaaacatgtttttagaagtagatttaaagctctctgattgagattggtttaatactatttgatgttatttgcatataggctcttctgacaaaaatatgttaattaaatcatgtcctctttggccactaatcaggtcccctttctccctttccaaaagtaacagtttttgtccaagttagttaaaacactattttttggtgtatgtggtggctcacacctctaatctcagcactttgggaggctgaggtgggaggattgcttgagcccaggagtttgagactagccttggcaaaaagacgagagagaccccgtctctacaaaaattacagaaattagctggatatagaggtgtgtgatggtgtcccagctagttgggaggctgaggtgggaggattgcttgagctcagggttggaggctgcagtgacccttgatagtgcttgaaatgtcaaatgttactattcatttatatatttccatttggttcttactccatagtaaagcttagcgcttcaactgtttagagacagtcttattgagcagcataagttgtaccatcttacaattataagaaaagactataggccattaataatattcatagaaaggaaacaatctttaataataaaaccccaacaatgccagtaattgctttaaagtactaatgatgtatttcctgatgaaaaaatcaagaacaatataatttttaaatttttttttcctttttttttgagacagggtctcttgctctattgcccaggttggagtgcaggggcgtgatcatgtctcactgcagtctctgcctcctgggttcaagcgattcttctgccttagcctcctgagtagctgtgattacaggcaactgccgccacacccggctaatttttgctttgttgttgttgttgttgttgtttttgttttttttttttgagtcggaggtttgctcttattgcccaggctgtagtacaatggcatgatctttagaggtgaagccagctgggcttctgggtccggtggggacttggagaatttttctgtcttgctaaaggattgtaaacacaccaaacagtgctctgtgtctagctaaaggtttgtaagcgcaccaatcagcactctgtaaaaacggaccaatcaggactctgtgtctagctaaaggtttgcaagcgcaccaatctgcactttgtaaaaacgcaccagtcagcgctctgtgtcttgctaaaggtttgtaaatgcaccaataagcactctgtaaaaacgaaccaatcagcgctctgtaaaatggaccaaccagtgctctgtaaaatggaccaaccagtgctctgtaaaatggaccaatcagtaggacgtgggcatcacaaaataagggaataaaagctggctgccggagcccgcagtggcaacccgccggggtcctcttccatgctgtggaagctttcttcttaggctcttccccagtaaatcttgctgctgctcactctttgggtccgcactacctttatgagttgtaacactcacattgaaggtctgcagcttcactcctgaagccagcgagaccacaaacttatcgggaggaacaaataactccagacacgccattttgagagctgtaacgctcactgcgaaggtctgtggcttcaccctgaagtcaagcgaaaccaggaacccactggaaggaagaaactccggacagatctgaacatctgaaggaacaaactccggacacaccatctttaagaactgtaacattcacggcgagggtccacgggttcattcttgaagtcagccagaccaagaacccaccggaaggaaccaattccggacacaatcttagctcactgcaatctccacctcctgggttcaagcgattctcctgcctcagcctcctgagtagctgggacaacaggtgcccgccaccatgccagctaatttggtatttttagtagagatggggtttcaccgtcttggccagtctggtctcgaactcctgacttcaggtgatccacccacctcggcctcccagagagctgggattacaggcctgagccaccacgcccagccctaatttttgtatttttagtagagacggggtttcaccacattggccaggctggtttcaaactcctgacctcaagtgatccactggcctcggcctcccagagtgctggggttacaggcgtgaggcactgtgcccagcaatattttcttttttaatcagatgagttttgcttttgacaaaaatttgcttctggccgggcacggtggctcacgcctgtaatcccagcactttaggaggccgaggcgggcaaatcacctgagatcaggagtttaagactagccaggacaacatggtgaaaccctgtctctactaaaaatacacacgcgcacacacacacacaaactgaggcaggagaatcgcttgaactggggaggtggtggttgcagtgaatggagatcatgccattcactccagtctgggtgacaagagtgaaactccatctcaaaaaaaaaaaaattgcttgtaattctatgttgattccaaataagatttcagaatagtaagctatttcccaactatttaaatctttgaggagtttattgttgcagatgtgcaaaccagatagatctaccggatgctactttggtatttggtatctttttcaggtttttgctaacaaccacaaaagactatgtttgtttgtttgtttgtatattagaggaaaatatttctgcagcttgggaatatatgggactaataggcatgtgtatcaccagtgtgtatgataccatattactgcctgaatgaacacatcagctgtaagaaggaaggtgagaatttgagaaatactggtctgtgttttgggtttatccattactggagttgcacgttttcccttgtcataattcctgtagcttttagctcttcctcattgtctgttgagttgaattaactctttctcccccaccacatttaactctagggagtgtaaacttgtgctgttctctttctcattccatgtttctgttgtcttttagttaacatcttgtctttgaggggaatgaattaacttctttaagggaagtgaattaactactttgagagaaataggagaaagagcagggacaaaataataacctgtggccaaaaggaggggatgtgatgtatgatgaaatgtcattcctttatcttatcttatattcttgcagtgctagctgttaaaatggatccagtagaccttaaacctaggcccttgtttgtgctgcccgacttcatgtgctatagtgcattttaaaatttattcagccattcatttcttatcttataaacttgaatttgttttaattttgtatagtttttcttatttaggaaggactttgtgttcttacatgagtttcatataatagagtttgaaactaagctattaaattatgatgattgccctaacatgtgcatcaggtacttttttgttttgtagttggttttattggagccattgcatgtcctaacagggtaaggagtgatcatatagaaagcaaggaagtgatgggtttggtctctggtcaaaccatagaagtgagttgagtaattcatttttgctctatttttccatctgaaaatgggaaggatgatatcctgactcccagtttatgcaagttttgttcatagataaaggtgcactggttttcactcatcttttgtgtgaaatttctggtggcataggaatttagaaagaaatcaataaacttgtgattcttgttctgaagatacttctagccttgtaatcccataatggacataagaccattacacgaagaaccgtagcatgtagtaaatggcatgatgacattaccacccaaggaaaatgtgcagtggaaactcatggttcaatttgacaaggcgtttatcaatctccaccatgtgccaagcctttctgggcagctgagagaagagataacaaaatagtttctgttttagagaacagggaatagaaatgatataaggattgagatgatatttttataatactttaggtttattctgcacaggcaaactgtgtattatacgacacataacttatgacacttaggtttctaactgggaaattgtaggtgcttgtttagttattgggtgttgttaatggctttttggtttggcagtttgtctaaggcctagcagttgtttgaggaacatttacatataggattaaccttttgtaatgttttcagaatcctgcagtttcgatgctttctagatatttaggatttgatcattaaccaggtgataatataagcatgaaaaaaatgatttgggctgggcgcaggtggctcatgcctataatcccagcactttgggagggtgaggtgggtggatcacttgaggtcaggagttcgagaccatcttggccaacgtggtgaaccctcgtgtctcctaaaaatacaaaagttagctgggcatgatggcgggtgtctgtaatcccagctacttgggaggctcaggcaggagaatcgcttgaacccgggtggcgaaggttgcagtgagcagagatcgcgccactgcactgtagcctgggggacagagcgaaactttgtctcaaaataataatattttatgtgaaaataaatgtaataaaggttaagcttagtattttaaagtttgtttattcctagggagtaatagttcccacattaaacatgaagagtttttcaaaactcagtgatcattctaattggtatgaagcatgcaggaggtaattagcttaagatgcaatggtggaaaacatgcataatttatatacaagccttgttacatgtgcagctatgaaagagttctttttcatatggtcagttatatgttatatgtcgacaagataattaaaagtagatttataagccaaaatttaatgatggttaagttaatggaaattttccctcaattaaaaacattcaacaataatgtaatatcacctcacctgggtgaaatgagtttattttatcttattatttttttaataggctttactttttagagcagttttaggtttacactgtgaaattgagaagaaggtacagagatttctcatgtattttcttcctcccatcacgtatgtacagccgcctccattattaatatctgtctccagagtggtacatcattataattgatgaatctacacatcattatcacccaaaatttcttttatttttaattaaaaatttttttaaaaaatagtacaaagccccctgaaccttgctgaaggtgtttttttttgttttttgtttgtttgtttgtttgtttgtttttgagacagggtttcacttccattgtctaggctggagtgcaatggtgtgatctcggctcactgcagcctctacctcgtgggttcaagtgattctcctgcctcagcctcctgagtagctgggattagaggcatgtgccactgcacccgagtaatttttttttttgtatttttttttttagaggtgggcttttgccttgttgcgcaagctggtctccaactcctgaactcaaacagtctgcctgccttggcttcccaaagtgctggggttacaggcattagcctctgaacccagctggtgccctataactcttgaacactttagtgtgttttttccacaaacaagaatgttttcctgattaatcacaaaatagtcataacaatcaggaaataatattgatatatttccactgtctaatcctgaagtctccattaacattttgccatgttttccagtgatatcctttcttcttttttgaggcggagttttgctcttgttgcccaggctggagtgcaatggtaggatctttgctcactgcaacctctgcctcccacgttcaagcgattctccttcctcagcctcccaagtagctggaattacaggcacatgccaccatgcctggctaatttttgtatttttagtaaagacagggtttcaccacgttggtcaggctggtctcgaactcctgacctcaggtgatccgcctgccttggcctcccaaagtggtgggattacaggtgtgagccactgtgcccggctgtgttcatttttttttttttttacggctgaataatattctagtacatggataataccacattttgtttacccatttgtcagttgattgacattctgatttttccaccttttgccaattatgagtaatttcataacatataacgttataaatattcatgtacaagtttttgtgtgggcatatgtgctcgtttctttggggtatatacctaagagtagaattgctggatcatatggtaactgtatatttaaccatttgaggaactgccagcctgttttcccaggtagttgcactattttccatttccaccatcagtgtgtgagcgttccagtttctccacattgttgtcagcatttgtggactgtctctttatttaaattcaattaaattttttgagacagaatctcactgtcacctaggcgggagtgcagtggtgctatcttggctcactgtaacctctgtctcccggattcaagccattctcatgcctcaaccttttgagtagctgggattatgggtgtgcattactatgcccggctaattctcgtatttttagtagagacgaggtttcaccgtgttggcctggctggcctcgaactcttgacctcaggtgatcctcccgcctcgtgaccaaccacgcctggccaacggtctctgtttttaagagacagggtcagtctctgtcgcccaggctggagtacagcggcatgatcataagctcactgtaatctggaactcatgggctcaagcaagcctccagccttagtctccctagtagctaggactagaggtagacactaccacatgtggttactattttttctttttctttcttttcttttttttttttttttaaagttgaagtcttaatctgtcgcccaggctagagtgtagtggcgtgatctcggctcactgcaatctctgcctcccgggttcaagtgattctcctgtctcagcctcccaagtagcagggattacgggtgcccgccactgtgcgcagctaatttttatatttttattagagatggggtttcaccatcttggccaggctggtctcgaactcctgacctcatgatccacccgcctcggcctcccaaagtgctgggattataggcatgagccactgttcccggccttttctttgtttttgttgtgtgttttgtgtgtgtgtgtgtgtgtgtgtgtgtgtgcgcgcgcgcatacttttaggtgttatatataagaaactattgcctaatccagagtctttgaagattttctcctaggagttttatagttttagctcttacatttagatctttgatccattttgagttaatttttgcatatgttgtaaagtaggggttcatatttactcttttgcatgtcactatccagttgacccaacaccatttgtttaaaagccttttctttccctcgttaaattgttttggcatcttcgtcaaaaattacccataaatgtgcagttttatttctggactctgaattccattgatctatatgtctatctgtatgccagtacttcagtgtttttattactgtacttttatagttttaaaattgtgacgtatcttctacctttgttcttccgtttcaggattattttggctattctatagcccctgaatttccatataaattttaggatcatttgttaatttctgccacaaaggcagctgggattttgacagtaattatattgaatctgtagataaacttggggagccatcttaatgatagtaacttttctgatccatgaacatggatgtcttttcatttacatcatcttaaaatttctttcaatgatgttttgtagttttcagtgtttagtttttttttttttttcctttagagatggggtcttggtatgtcatgcaggctggaatgcagtggtgtgatcatagctcactgcagccttgaactcctgtgctcaagtgatcatcctgcctcagtctctcagtagtctgggactacaggtgcgtgctactgtgcccggctgattttcgtattttttgtagagccagcatctcacttcattgctcaggctggtcccaaactcctggcctcaagcagtcctcccactgtggcctccccaagtgctggtattacaggagtgaactaccgcacccagccggttttcagtgtttcagtctcgtacagtcatgcgcagcataatgatgttctggtcaatgatggacagcatatatgatggtggtcccataagattataacagctgaaaaattcctaacacctagtgacatggtagccgtcctaatgttgtagcacaatgcattactcttgtgtttgtggtgattctggtgtaaacaaacctacttcgctactagtcgttatagaagagcaaaggcagaagacacacacatcacaattttaaaactatgaaagtacaataataaagacactgtggtactggcatacagatacacatatagatgtagcagctggttgtccaggctgggtggggtgctgcccccatgcctataatcccagctttttgggagcccgagatggaaggacggcttgagttcagaagttcaaggttacagtgataataataaagattattactggtatatgtatttatgatattgtactttttattttagagtttactcctacttattaaaaaaaagttaactgtaaaggagtctcaggcagtccttcaggaggattccagatgaaggcattgttatcagaggagatgacagttccataagtgttattgcctgtgatgaccttccagtggaacaagatgtggaggtggaagacagtgatattgatgatcctgaccctgtgtagggttaggctaatacgtctgtgtctcggtttttaacaaaaaaagttaaagaaaaaaaaaatagagaaaagagaaaatgatataaagaaaaaaatgttgtacaactgcataatgtatttttattacaacagtcaaaagtttatgaggtaaaaattacagtaaaggttaatttattattggagagagaaaatttaagaaataaatttagcgtagcataaatctacagtgtttttaaagtctacagtactgtacagtaatgtcctaggccctcctattacccagacatgttctagtcctgtaagctgcgttgatggtaagtgccctatgcaggtataccattttttatcttttatgctgtgttgttactgtaccttctctatgtttaggtattcaaatgcttaccattatgttaaaactctctatagtattccatatggtaacatactgtacaggtttgtcgtgtaggagcagtaggctataccatatagcctagtgtgtagtatgctctttcatctagatttgcgaagtttactctgtgatgtttgcacagtgacagaattgtctaatgacgcatttctcagaatgtatccctgttaagtgatgcatgactgtacttctgtttctaaatttattcctaaatattttattctttttctgttgtgaatggaatttgtaattttttttcagattacaattatcatataaaaatacagttgattttgtatattgatctttcatggttacttaaacttgaattaaaattacatttaaaattacattttgcatttccactagctaccattcaagcgcttcatagctacatgtggctagtgactaccatatttagtagcacagatttgattattttcaacgttgcagttttattagataccaaataaaaacaaaaaaatgagtaccccttttacctctaatttccctctgtccagaggtgcttcatttatgtatttatttattttttgagacagaatctcgctctgtcgcccagactggagtgcagtggcatggtcttctctcacagcaacctctgcctcccgggctcaagtgattctcctgcctcagcctcctgagtagctaggactacaggcatgtgccaccacgcctggctggtggctcattcctgtaatgtttttatatttttagtagagatggggttttaccatgttggccaggctggtctcgaactttttacctcaagtggtctgtccaccttggcgttccaaagtgttgggattacaggcgtgagccaccatgccaggcccagaggtactttaaactcttatctgtttcttctggtacttgtctccatatgtccatgtgatatgcccatattgctattttttgagattcagacatttttactatgagatatggtaacttagctttcttatatttcttcctatcttcttaacatgtagatttagcaacttttagatttattcattgtatccattatatctatataagtaatcacagctgaagcatagagtggattgtgattagattttatttatttatttatttttgagacaaggtttgactctgtcgcccaggttggagtgcggtggcgcaatctcagttcactgcaacctccacctcccgggctcaagccaacctcccaccttggcctccaagtagctgggactacaggcacgcttcaccacgccctgctaatttttgtattttttatagagacagggtttcgccatgttgcccaggctggtctcaaactcctgagctcaagtgatcttctcgcctcagcctcccaaagtgctgggattacaggtgtgagccactgcacccagccaattagacttcttaaattttttcttttccttggccctaataattcatttttttgacttgcttagttacctgtgaatctatctttaattcatctctaaactctcctctggatgtatgaatcttatatgaacatactgaaacatatcagtaaactaccaattgtcaagaccttcgaagggactgaatttttaccctgtctggaagttaacaggttagccagggagttttgtagatgctgtggcaaaagatgtgagacttctgggtcaaaggcgtaggactttattacagcaacaataatagccagcatattagcattttcttgcactatactggttcccaaggccccagttcacatattgtgataagaagaggcccaggtgatacttgtatatgcaagggttgtattacagggaagaacctgaatttaggtaacctaaatcttttatattggtctgtaaacatgcctgccctttgctccagagggatatgctatcttagtatcttctaagactgttttcgatataaacatttctggaaaagatggtgtggaataaaggtagtcagtacctctgctcacatgagtgcagagacctatggaaaattgtcttctaatatcagtttcatccatcctccccacaagaagacataagtgtgtcccctttgccattctccaatctggattgtctggattgttaacgttttagtcctgcttctcagctgcatctcagaagtttcctttgctgtcaaccttggatttcccttttcctctttgatgtagatcctattttctggatcccatgcttctttctaggctttccgttttgacagtgcatatcctctggtgcttcctgacaaagaatacatggaaagttaaaaaaagaagactgggtacggtggctcattcctgtaatcctagcactttgggaggtcatggtaagaggattgctggagctcaggtgggaagactagcctgagcaacatggtgagttgtttctactaaaaataaaataaaaaaaaaaattagccaggcgtggtggtgcgtgcttctagtccagactacttgggaggctgaggctagaggattgcttgagcctgagagtttgaagctgcagtgagctgtcattgcaccactgcactctagcctgggcgacagagcaggaccctgtctcaacaaaagaaaacaacaaaaaacaaaaaacccaagaggccaggcgcagtggctcatgcctgtaatcccagcactttgggaggctgaggtgggcggatcacctgaggtctggagttccagaccagcctgatcaacatggagaaaccccgtctttactaaaaaaatacagaattaggcaggcatggtggcgcacgcctgtaatcccagctactcgggaggctgaggcaggagaatcgcttgaatctgggaggcagaggttgctgtgagccgagattacgccattgcactccagcctgggcaacaagagcaaaactgtctcaaaaaaaaaaaaaaaaaaaaaacaccccaccaagaaacccctggtgtgctgaaaatcttcaactttcactagatggtttgactagatgtagaattatagattggaaataattttttccccagattgtaaaggcattcttttagtttattgtctcctagcttttgttgttgcctttgaaaagtcaagtagtgttttgattctcagttctttgtatatagttttttttctctctctctgaaagcttatggaatcatttattcctcatgatgatgatccttcctacgggtctttttcattaattgtactgcacacttaatgagtgcagttagtggagacatacttttcaggtctgaaaaaattaacttgtgttttttttgagacaaggtcttgctctgtcacccaggctggagggcagtgttgcaatcatggctcactacgagctcagactcctgggatctcatgtcttagcctcccaagtagctgggatcacaggcctgtgccatcacaccaggctaattttttaatttaatgaaattttattttattttatttattttgagacagagtctcgctctgttgcccaggctggagtgcattggcgtgatcttggctcactgcaacctcttcctctcaggtttgagcaattctcctgcctcagcctcccgagtagctgggactacaggcgcgtgctgccacgcccggctaattttttgtattttagtagagacgggaatctcaccatgttacccaggctggtctcgaactcctgagctcaggcgatccacccaccttggcctccgaaagtgctatgattgcaggcgttagccaccattccagtccaaatttttaaattttttgtggagatgatgtctcaccatgttgcccagtctcgaactcctgggctcaagcaatcttcctgcctcgacctcccagagtgttgggattataggcatgaactaccacactcggcagcatattttaaaatgcagttatttctgaaagtttttggttttacacaatttttttttttttaggtaataagatgtattgtaaggattatgcttacgtatggtacagagtatacttcacattgttcctgtcttttttgtgggggagggaatgaccgaaagcattgggaatgttaaaggcaaatgagtaaaaagaaaactaaaaaacgattacttcttcaaataatgaggaaagcgtttttaaaatttttgtctgtttttaaaaagcaagtttcatgttagatttcttaccacactcaattttttcctaatataaaatagatataaaatttgtgatttgttactttttatgtaagcatatatagtccagtctaaaatgaccaacttccaaatgtgttccagaaaagaatcatgacattttatagctgaaaaggacctaaaaatccagtccttttaatataacatatggtaactgactccttgggagtataaattaattatttaagagcaagtaagatagtagcagagctagaacaataactcagatgcccttatccattctaatatccacagcatttctagaaacctcacttaaggcattaatgtgataggttttactcaaaatagtcaaccacaaatgtagcaaatacctaggtgactttatgttctgaatctcacgaagattaacctctgatcatttgttttatttctaaataacctcctttttctaaagtgctcctctgacactttggtgtgtaggtgaatatcaagttaacctgcctcagttatttccagtttgtctatacatatgttgtctaggcagatgatataacatattttaaaagtgtcatgttattgagaactgaagccagtatatgttaaatgattaaaaggaacaatttaaagaattttaggattctttggtctcaagtgacagaaactgaatttggtttttggggttttttgtttgtttgtttgtttgtttgtttgagacagagtctcactctgttacccaggctggagtgcagtggcgcagtcttggctcactgcagcctccgcctcctggcttcaaacgattctcctgcctcagcctcccaagtagctgggactacaggtgtggaccaccacacctggctaatttttgtatttttagtagagatgaggtttcaccatattgaccaggctgtctcgaactcctgacctcctgtgatccatccgcctcagcctcctgaagtgctgggattacagccatgagccactgtgcctggcctgtttgtgtgtgtgtgtgtgtgtgtgtgtgtgtgtgtgtgtgtgtgtttgtttgtttgtttgtttttgagacagggccttgctctgttgaccaggctggagcgcagtggtagttagtcatagctcgctatatcttcactgcagctttgaactcctgggctcaagtgatcctcccttctctgcctcccaagtagctgggactacaggtgtatgccaccatgcctggcaagtttttaaattttatttttattttttattttttgtagagacaaggtctttctctgttgcccaggctgatcttgaactcctggcctcaagtgattcttctgccttgtcttcccaaagtgccaggattacaggtgtgagccaccacagccagccagaaatgtagtttgaacaaacttaaacaacaaaacgtaaatttattagttattaattaaaccatgtgaaggaacaggaatcactggaatcaggaactcaaacacttttagaattctgtgtctcgtttctgcttctttatgcatgttggcttcatcctttcagatgggcatactccattttctgtgagatatcctttcatgtgttttaggccttgtatattaatagttctgacatcagaagacaaaagcattctctcttttagaatcagtttgaaaaatccagccaggcatggtgattcacacctgtaattccagcactttgggaggctgaggtgggcagatcacttaaatccatgagtttgagaccagcctgactaacatggcgaaacccaatctctactaaaacaaaccacaaattagctgggtgtaatgatgcacgtctgtaatcttagctgctccggagactgaggcacaagaactgcttgagcctgggaggcagaggttgcagtgagccaatatcgtgccactgcacttcagcctgggtgacagagtgagactctgtctcaaaaaaacaaaaaacaaaagaaaaatccatggagggatctatgtcatggtcctgttgcttgaacaaaatcactgtgggcctaaaatgggcaaatgtattggaatttccttagtgtaggtcagactgtggggtgtgggatggagagaaggcattttgttttcctttttaatcaagatgcttctgagacaaatgtgatctgctatgacagattaaggtttttttaaataacataaccagtctttttatatatgcctttatattttccttcattttcatatgaactgaagacttctaattcccaagttgatagaattttcactgattacattttcacttgagttcttatgagtgatgtcttaatttagagtattcagcctgtagtttctctcatttgtagaatgtacaaagatcccaaatctgtactttgcttaatgtgaaaaaatcaatatttttaaaatctgttgtagttagacaatatacaggttatattcaaatatgtgcaagtatataaatgtatgtgtcttagttcattggtccttctaaaacaaaatatcttaggctggggtaacttagcagagatttattgcttgcagttctagaggctgggaagtccaagatcaagacgtcagcagatttggtgtctgttgatgacctgttcctcataaatggtgccttctgtgtgtcctcatttggcagaagggacaaacaagctcccttggacctcttttataagggcactaatcccattcatgaaggctctgcctaatcacctcctaaaggctccacctcttaataccatcaacatcagtgttaggttccaacatgtacatttttgggggggggacacaaaaattcagactatagcaatgaatatttagaaattaagcagttttggccaggtatggtggttcatgcctgtaatcccagcagtttgggaggctgaggcgggtggatcatgaggtcaagagattgagaccatcctggccaacatggtaaaaccccgtgcctgctaaaagtacagaaattagctgggcgtggtggtgcatgcctgtagtcccagctactcaggaggctgaggcaggagaatcgcctgaacctgggaggtggaggttgcagggagctaagattgcaccactgcactctagtctgggtgacagaacgagactccatctcaaaaaaaaaaaaaaaaaaaaaaagaagcagttgtaccctaaaggccttttaagttagttaatgtggtctattttattttaggatttaaaaaaacactttaaaataatttaaaaacaatttgtgttgtcatgtgaggtcggttatcaatgataaaggttcttattggtaagaggatgaggaatgctttaaacaaaaggcgaagtgttgggtggagcagattatttggcttagatttttgagaagctggaaaggagaaatgggatatgatgaagggaaacaaatttggtggtttgggatagaacagttgaggcactgtaaacatgaggtaagaagaattaaagcagtgtaagtagtggaggacagagatggtaagaatagagagagatgaacaggctaaagaagcagtttagcaaaatggagaatttagataccaggaatgacctgattcaggctagtaagtgacgtttgcctagagatcagtctaactggggctcaagatatggcctagctgtgaaacaacagatgatgagtgagaagcccagcatgcagaaaagaagtttgcttggcaaaccagagattctaccaatatttagggacatggctttccaagatcaggaaacttctgagtttagaacattgactcaacacaaggttaaatgggactcttgtttagtctcctttgactcttatgctgttgctaatatcatttatgaaatcagcaaggaccaaaattagggtaacaactaattgttaccctttcaaggatgacgtatgctctgtttattcaagagtaatacattactgaggagaagcgtggcctcagcatgagcactagctccacaggtgtggctgatggctgtcagtgctttgtaaagcatgttctcttgaaaggagatctgaatatatgtgtctggctgccacagcaatccttgcttgaaataaaattttccattactgttagaaaagtcccagagaagtctcctgttggcctgtcttgagtcagtgccttagcctgtcagtggccaacaggttggtgtgcttttggcaggcttgggtcatgtgtcccttcctgaggggatgggagtcaattctcgggcttaaatcaccatatgaaagtgaaattctgttactagagaacagtaatggatgctgaacaagaaaatgtttggcttggtgtggtagtgtgtgcctctagtcccagctgcttgggaggcagaggcaggaggatcacttgagcccaggagttggagtctaacctgggcaacgtagtaagaccctgtctcagaaaagaaaaaagttctctataatggtggtttgctgcactgaattttttcttggcaggggacagtttgctgcactgaattttctctttttgtaggagacagtatagaagttgacagaatgctaaggaaaacagaatgaaaactaaaaaaaaggagaaaggcagagcctgttgtgttgcatggcaataaaaccagatgaagaatgacctgttttcaaccagacagttccttatttctacttaaaacatgactgttctatgcaaatacaggaaaatttaaaagggccattaacatagacattctccatccttttgcctagattgaatgatgtcctgtgtcttatagtgtcatttattgagcgaggtaccctttctcaaagctgtgtctgtgctaagtttgcaggaatcgaaattttgagtgattgtactatattagtgaggaaggctagtgaaaaataattacttcccttgtgatccttcatgaatccttaggagatttagctaaaaataattttttgttagaggaaacatttctaatgagttctgctgttgacagatcagtttggaaagaaaagagctctgcagttgatcagcatagtaatatatttctagtttatttgtatgctggaccctggatgacatagttcctgtgatctcagttattctggcagtagctcagctagttcatatccacagttgtggcaaaaacttttgtactgaaacaagtgaagtacagataatgtgacatccagaatgtgctattgtggtctgtttttcatctaagcatgaaataatgatattgaaaaattgtttttaattataagaggaatatataatgttagataaaataacctgtactttcactgtgaatatttattttcttttaataacttctaatatagcagtataaggtcatgttgtttggacgttctgggggtagttgctttatattcacattcatgtaattgggagtgtattacctttgggtcccactacattttaaatattgagttttactatattttattttgttttttctactggtattttatttattttattttatttatttattttgagactgagtctcactctgttgcccaggctgaagtgcagtggtgcttcacttggctcactgcaacctctgtctcctgggttcaagctattctcctgcctcagccttccaagtagctgggatgacaggtgtgggccaccgtgcctggctaatttttatatgtttagtagagatggggtttctccatgtcgggcaggccggtcttgaactcctgacctcaggtgatccacctggcttggcctccgaaagtgctaggattacaggtgtgagccaccacacctagcctatattttaaatacttttttgttttgagatggtctcactctgttgcccagactggagtgcagtgacctgatctcagctcactgcagcctcacctcctgagttcaagtgattctcctgcctcagcctcctgaggagctgggactacaggcatacaccaccacgcccggctatttttcgtatttttagtagagacagggttttaccatattggccaggctggtcttgaactcctggcctcaagtgatccgcctgcctcggccttgcaaacttttgggattacaggtgtggcccagtgcacctggcagtattttaaatacttttacattaaaaaaaaatttttcgtgagtatataggagtaggtgtatatatttatgggttacctgagatattttgatacaggcatacaatgtgtaataatcacattagggtaaatgggatgtccatcacctcaaacatttaccctttgtattataaacaatccaactatactctcagttattttaaaatgtacaattaaattattttttatgaaatcaccctgttgtgctagcaaatactaggtcttactcattcttttctatttttcgtatccattaaccattctcacttacccctacctccaccattctcactttccccctactccccactcccctacctccctatctttccctctacctcctcctgtcctacctccccactttccccctacccttcccatcctctggtaaccatccttctactctctatttctgtgagttcaattgttttaatttttaactcccacaaataagtgagaacatgcgatctttctgtgcctggcttgtttcacttaatataatgacctccagttccatctatgttgttgcaaatgactgaatctcattattttttatggccgaatagtactccattgggcatatgtaccatattttcttttcttttctttttttttgagacagagttttgcttttgttacccaggctggagtgcaatggtgcgatctcggctcactgcaacctctgcctcctgggttcaagcaattctcctgcctcagactcccaagtagctgggattacaggcatgtgccaccatgcctggctaattttgtatttttagtagagacggggttttaccatgttggtcaggctggtctcaaatgcctgacctcaggtgatctgcccaccttggcctcccaaagtgctggaattataggcgtgagccatggtacctggcctgtaccatattttctttgtccattcatcttttttttttttttaagttttattttgagacagagtttcttgtccaggttggggtgtagtggcatgatcttggctcactgcaacccccgcctcctgggttcaagtgattctcctgcctcaggctcctgagtagctgggattacaggcatctgtcaccacacccagctaatttttgtatttttagtagagacggggtttcaccatgttggtcaggctactcttgaattcctgacctcaaatgatctgcccgcctcagcctcccaaagtgttgggattacaggcgtgagccactgtggctggcagggaaagatacttgtacatgggtcaggaattgaacccgggtctcctgtgtgaaaggcgagaattctaccactgaaccaccattgcgctgacttatccgtagagcagataaacgaacagcaaccttggtcctttaaacttcatcttgaacttagaaataacaagaaaagacccttgagccccaaataactttttgacgagcatgcaaatgtaaaatacacttcagaaaggtttaaaaatcttttggacctcttatgctttataattattccttatagttgactaggatagaatacttaaagtttctattcttttatattaatgcacatacatatttttttaatttttttttttttttcaagagacagggtcttgctttgttacccaggccagagtgcagtgatatgatcatggctcactgcatctttggcttctgggctcaagtcatcctcccacctcaacctctctagtagataggactacaggggtccaccatcatgcctggctgattttctaaacttttgtggagttgaggtctcacaatgttgcccaggctggtcttgaactcctgtctttaagcaatgctcccgcctcagcctcctaacgttgtggaattacagacatgaactgccacgcctggccagcgttatgctttactccttttgataatggaagtaatacatgcccaagttaaaaaaaaattaagccatactgaaaacattttaaaaatacaaatcaactttatttccaacattcagagaaaacttaggttatcattttggagcttactttttggacttttttttgtgcttgtatttacacacaggcacatacagaattatgatgattatgttcaagatgctttgtaaccagctttttttcacttagttatatcgtagatatctttacatagcagtaatgcatagtaataccattttaaattactgcattaatgtactatatgaatgtattgtttagtcagcctcatgctttttctctttcatcattaaatgagttcatgaacatgaatattcttgtctgtacctttttcttatttcattattgtataatttaaagctacaaatgtagcagaacttgtaaaacttcagagtgaaatattgaagcccttgaggtgttggtattttttttattttattttttgttactctgggatcaagattaggaaaaatatttctctctctcaggctacgtgttttctggggctgttatctttttttttttttttttttttttttgagacggagtctcactctgttgcccaggctagagtacagtgccatgatcttggctcactgccttctctgcctcccgggttcacactgttctcctacctcagcctcctgagtagctgggactacaggcgcccgccaccatgcctggctaattttttgtatttttagtagagacggggtttcaccgtgttagccaggatggtctcaatctcctgacctcatgatctgcccgcctcagcctcacaaagagctgggattacaggcgtgagccaccgtgcccggccggggctgttatcttaatgcttacaggactttatttgtatttttatctttgtttatttttgttttttaaatttttttactttttgtgtttttttccatattggttttttcatgttcatatgtaaactgtcatagtatttcttagacatcattaatggatagaaatcttaattttaaaatggaaaagaagaatgagtctaactgcatgtgtcaacttaatttattttaaaaattacttaatgtttagctgggcctggtggctcatgcctgtaatcccggcacttcaggaggctgaggcaggccaatgaatcacttgagtctaggagttcgagaccagcttgggcaacatggcaatttacatcttttagggttataacacttacaatgtttgggaaggaaggatccttttattacttttagtttatcatgattattattaccattttatttatcatattatttataatttttttcttaaaatttttttttcctggatgctcttatagggttaaacattattatcactttaatcagacattatgttatggccacatttcacatattagagtgaaaggaaaagaggaattcagaaaagcagaagaaagtgagtcaaaatttatacgttcaaatcagtgctacctttccaagcaatatatactttgctgccactgctcaaattgtccattggatctcattttctagataatggctttagggttttatttgcatctgtgcaaagatgtgtctattcaacatgaaaacattagtgagttcagtcaatagtttggtttggggtttatgtgataccagtagttttcaattctggtggattagtttttttactttctggtggactcagcagaatcgttgtgatgagttttttggtaggttagtttgctagaaatgggttatttttgaattaatgatcactggtttgttttttttcccagtcagcagataagcagagagccctagaagaaaccaaagcctacaccacccaatccttagcaagtgttgcctatctgataaacaccttggccaacaatgtcctgcagatgctggatatccaggcatcccagctacgaaggatggaatcttcaatcaatcatatttcacaagtgagaccacaatattttcctatttgcctatgaggaacccttaataataaacacaggctatctgtaatgctggcagcttttattatgtaagttaactcacatgtacgatttggaaaatagcaacttaatattaggttgtttttagattctgtctttttgtgggatggttatcttctctgtgattttgataggaaagtaaatcgtaatgaattttattaaaactcagttgtcatggtaacataatcagccctataatgaaacttcatccattcccccgcctttttttttttttaaaacaaatttcatacttctttatcaatttaaaaagataaacttgatagattggtggcttgttcaaaaatttttttttcttttggtaggatttatgtttactgggatggtaccatacctgcaataatggaaagactagcaaaccttatgaaattatttttattatatataatttaaaaaaaagtgtattacttcatgggcttgtaaaagttttttaaaaaatgttaatctgtcttcattataaaagccatactcatgaaaacccagaaaaagaagagaaaaagtagaaaaataaaccattttaccacttcccaagcttttctctgttaatattttggtatatctccttgtaatcctttttcctgtaagtagttttttttaaatgtaactgtgggctgggcacacatctgtaatcccagcactttgggaggctgaggtgggaggatcgcttcagcccaggagttccagaccagcctgggcagcatagcaaaaccctgttctctaccaaaaatacaaaaattagccaggtttggtggtgcacgcctgttgtcccagctacttgggaggctaaggtgggaggatcatctgagcatgcggaggtctagactatattgagctgtgattatgacatgcccttcagcctgggagacagagtgaaaccctgtctccaaaaaaaaataaaaaaaagtagccaggattataatagagtcagttatagaataggtataaaattttgggttctgcttttttaacttagcgttaaggcaaacataatctcttgatgttgtaagttcttcataaacattctcagtggctgcataatgttgcgtgtatatgttgtacctttcataatcattcccatattttggggccatttaaaataatactgcagtgaaaaaccaattaagttgtaaaatgcaatttaaaaaatataaaaatgataaaggttttggtctgcctccctttttttgaatagatctttgaaatgttctattttagcactcttgtcatttgaatgattattattcaacactctttttagacctaaatgattagaactattttggaatgaaaataatttttaaatgtgcatattattattatttttaatgtcttgagagttcagggctcttttcaaatgaactaaccatctttgagagtctaaagtttagcaaatttgtataactagaccaaatatagtccagataataaaatcagatatggtatttttgaaaatttgtcagaccaatttagagagatttcttatttaatattacttaatctgaaatctgaatttgccattataagggtttcttcacattttatacaaacttctgcagacatatcatttattgcttgttatattgtgtatcttaagttaaaaaaaaattggtgcgttttaatgagtgtaaggtaaatttcagttgggaaaggcctcctgaaggaaataatcaatgggattttaaatgacgaaatagatgaattttttttttttttaagagacaaagtcttgccctgtttcccaggctggagtatagttgtacaatcatggctcactgcaacctcgaactcctgggctcaagggatcctcctgcctcagcctctcaagtagctggctgggactacaggcacgtgccatgcttggctgattttttttttttttttttttttttttttttttgtagagacagtgtcttgccatcatgctggggctggtcctgaaatcctgggctcaagcagtctcccaccttagtctcccaaggtgttgggattacaggtgtgagccagtactcctggcctgaacttggttttctgtagaaggagggaggttgacaaattgctaatgtgatatagaatttcaagatctattcttgagaatcctaaaatttttccatgtttgaagcattagcaaaggatgttaaaaagaaacgttaaaaaaaagaacaaatatagaagagaaactagtatatttgagttcctaaaaaggaggaacaagttttactaggcattaggggagagtaggagagattatgtgggtaaatgatgacaacaagcaaatagcaatgaaggataataatttattttctgtttagaattttgtagtactttggtagaaaagtgttagcaagctcaaggaggaaggtgaatactcagccaccctagattttgagtatatgtattaattcagttattcagaacattttctttaggagtatcatataaattggcgtttaattaatgtggtcaattaatgctgtcttttaaagctatcttaatggattaagtaaaaaacagaagaatggatagagattaataaactggaaattacagaggcctcagtcaaagctgtcaggaatacgtcgaaccttcttttttcagagttgagtgtctagagggcaatagttggaggggtaatagatctgcaattctcagtggctgttaagtttatacagaatataaattattatgttggataaaggatcaagtctgagaaataggctgatagaggctatatttaagaaataagagtaattttaaaaatttatgtattttctagcatttgcctcaaggattgaaattttttttttttacttgtgtttacaggtagaattctttatttaaaaagtcagttgaatatcaaaactatttgatattcttcagactggaatattattctctagtgtagaagaaaacattttctgcttacaaaacaaatagtaaatactctaaaataggggttggcaaacttttcttaaataaaaggccagatggtaactattttaggttttgtgggccatgtgttgataactattttaggttttgtgggctacgtatggtgtcattctcctattctctctctctctctctctctctctctctctctctctctctttctgtgtgtatgtgtgtgtgtgtacttttttttttttggttgggggatggggtctcatgatgttgcccagggtggtcttgaactcctggtctcaagtgatcctcccacctcagcctcccaaagtgctgggattacaggcatgagccaccatgcccagcaaagagagatgacattgcatgtaaggatagagatgtggacagatttgagagacagtttaattacgttttcttttcttttttgtgtgtgtatttttaaacaatgatttaaaaatgttaaaactattcttagcttctgggccatataaaagcaggcagcgggccacattctggcatggagccttagtttgccagcccctgctctaaaatactttttccaaatgtttgagtgttaaattttattatgatgcttgtattattatttaaaatattgtgtgtttctagagggaaccagggggttcttgagaccagatttttgtgcaacttgggcaaaaatactagattccgagagtttgtagagaagattgagttgaaggaatggagggttcagtcaggtcaaagacaagatcacacatttattggaatggcaataagcctcaagagttgtaagggtagagttgtttaggactagtagatactagttatctagggtattgagtttcttttcccattagtattcttttctctattgcctgggtaagaactttaccacctttcagcctcctagccctttcatctattttaacgaaaaagaacgctgagttggcctgaaaaagatcagggcatctaggctttaccctgactcttctgctgacttgtgtgacatttgacttctttgaacttaggttttttcatctgtaaggtaggactgtttagataatttcttaaatgttttccatcttgaattccttatttttgcgattctcacaaatgagcttgattttatttgcttccattctgttctgttggttctgctctttacctcaatctgtgtccactggtctcaaccctctattactttaatgtaactgaactgtttcccaaattactctgaattgtaatccgaggatgggaattccattgactgtactctgtatcggggagaaatacttcaacaaaacaaagtaataacccactctttctaaatgtcaaatgttttcaaaaacaagatattaattgattaggaatatatagtatcagacacttttttgtattaaaaggacaatatagtattaagtagtatactaatttttactacattcatcatatctataaggcagtattagggttggttcttaacatggattatgttatgtattttagggctggtaaattttaaagaaatttcatctctagctttgttgctgttatcctattcattctttggaaggatattattaaaacaaatgaaaatttttatcttcaaactgatagtggagttaaattaacattaaatatttcccctaaatatatacttatcagagcaaacatgtaattttactgaatacttgtacaggtacacatacctttaagtcagtatagtgtaacattattataaggatgaatgttgcttactgtgcccattattttgtgtccttttctggtaagttttttttaataaaaagtttgcaaaacacttttcaaactaaaactcttatcagtttgtaaactaaaatttttcttttttctttttatttttattttatttatttatttatttttaattgatcattcttgggtgtttctcgcagagggggagttggcagggtcataggataatagtggagggaaggtcagcagataaacaagtgaacaaaggtctctggttttcctaggcagaggaccctgcggccttccgcagtgtttgtgtccctgggtacttgagattagggagtggtgatgactcttaacgagcatgctgccttcaagcatctgtttaacaaagcacatcttgcaccgcccttaatccatttaaccctgagtggacacagcacatgtttcagagagcacagggttggggctaaggtcaccgatcaacaggatcccaaggcagaagaatttttcttggtacagaacaaaatgaaaagtctcccatgtctacttctttctacacagacacggcaaccatccgatttcccaatcttttccccacctttcccccctttctattccacaaaaccgccattgtcatcccggcccgttctcaatgagctgttgggtacacctcccagacggggtggtggccgggcagaggggctcctcacatcccagtaggggcggccgggcagaggcgcccctcatctcccagacggggcggctggccgggcggggggctgacccccccacctccctcccggacggggcgggtggctgggcgggggactgactcccccacctccctcccagacggggcagctggccgggcagaggggctcctcacttcccagacggggtggctgccgggcgtaggggctcctcacttctcagacggggcggctgccgggcggaggggctcctcacttctcagacggggcggttgccaggcggagggtctcctcacttctcagatggggcggccgggcagagacgctcctcacctcccagacggggtcgcggctgggcgccctcatatcccagacggggcggcggggcagaggcgctccccacatctcaggcgatgggcggctgggcagagacgctcctcacttcctagacgggatggcggccaggaagaggcgctcctcactttccagactgggcagccaggcagaggggctcctcacgtcccagacgatgggcagccacgcagagacgctcctcacttcccagatggggtggcggccgggcagaggctgcaatctcggcactttgggaggccaaggcaggcggctgggaggtggaggttgtagcgagccgagatcacgccactgcactccagcctgggcaccattgagcactgagtgaaccagactctgtctgcaatcccggcacctcgggaggccgaggctggcggatcactcgcggttaggagctggagaccagcccggccaacacagcgaaaccccgtctccaccaaaaaagtacgaaaaccagtcaggcgtggcggcgcgcgcctgtaatcgcaggcactcggcaggctgaggcaggagaatcaggcagggaggttgcagtgagccaagatggcagcagtacagtccagcttctgctcggcatcagagggagaccgtggaaagagagggagagggagaccatgggccgtggggagagggagagggagagggagcgggagagggagagggagactaaactaaaatttttctaagcgaggcccatcttttttctttgctagtaaaattagtcagtacttatccatgttcaagtttgtcatggcttagaaaaaaagattaagcaaggtcaaaaggcaacataaagaacttaagaaagtagtgctcttcccaccttcccaagggctgagtaggacttactgggccaggtgttaaattagttagcaggtaacaattaaaggagctggaaaataattatcataaaataatataaaattggaagtaattcttctcaagagctaggtattgaaaggcagtggccttaagaactcaacaagtagggtagcttttactgtctaaaaactttaggctgggtgtggtggctcatgcctgtagtcccagcactttgggaggctgaggcaggcggatcccttgaggtcaggagtttgagaccagcctagccaacatggcaaaattccatctctccaaaaaatgcaaaaattagccaggtgtggtggtgcacacttgtagtcccagctactcaggaggctgaggcgggagtatcacttgagcccaggtggtcgaggctgcagtgagccatgttcatgccactggattcaagcatgggcaacagagtgagacactgtctcaacaacccaaaacacaaaaactttatatagatagccttgcttaagaatttctaattttggccaggctccgtggctcacgcctgtaatcccagcactttgagaggctaagggtggccggatcacctgaggtcaggagtttgagaccagcctggccaacatagtgaaaccctgtcgctactaaaaatacaaaaattagctgggtgtggtagtgggcacctgtaatcccagctactctggaggctgaggtaggagaattgcttgaacctgggagcggaggttgcagtgagctgagatcgtgccactgcattccagcctgggtggcaaagcgagactctgtctcaaaaaaaaaaaaaaaaaaaaaggaatttccaattttaattaaggagatacactgaaggttatcaatacgtaattatgcatagaaagtagactttttatacttcccaattaatttcctatgtagtttttatatcactttatataaaaaaactgaaaattactctgttagtaactaatttgttttatgaatgatacataatttgaagcataattgtaatttaaatgtttatttgaaacattagcttactaataaaaaaaattgagacatatttaaaaacacccaatttagttgggttaatccactgtaactgtttgattgcagatgttttcccacactgatgggcagctaactgaggtagtgctatccagtacagtcaactttcaattatctgtggtaatgggaaatgacaatgcatggataatcctaaaacaaaatattttatacagtaccttcctgtcatctgctgtggcctgagcatgtgcttgggttcatgagggagatgtgggagtggggctcaggcttgcaaaggagctgggagtcagtatgattatctcaaggccataagaggtatccttaaggaacctgggtttggcactgtgtggctgaagtgtcatggggaaagcctgcagcatgcaagatcagcttggcaatatcagtgagaaggatggggaagctaattaataaggaactgtgggagaatagttgtttattaagtcctatacaattgcagtgatatatcttggtgtgttttttggttaatgggatctgtagcaaacaataattatattaattgtgtatttgaattagttttggtcatctttgattgctagcagaacacattttttacttgccacaggtgagtgctgttattgaggtctcttctaaataagtaggtttattgtcatataactagtaacttaaaaaacccagaataaatttgaaatacttttcttacttttaaaattcatcctaaatatcagtgttgaacttgtacttccaaaatttaacttaatgaaatttaacattgtaatgtcaaagaatatcatgagggcaaatgccataattactgatactgtgaatttgatgtaggaaaaatatagtagccatattttatttaagaatatgttacaggagctttcctaaatttcttttacaactgacaattgtctacgaatttatgaatgttaaagctgcatgatagatgtgaggagggagtgtttattattctatctaatttgaatatgcttattttctacaagtgaaagctataaaaaaattgaagcagatgattgctgaaaaccttagaatcttctggaccaacctgagaatcttctgcttgtttatgaaatagatttagtgctctctgtcaaattattcaaactccaaatagaaccgtagccattttctaaaggcatgttttcttctgcccacaggcaatactgcagttcaaccccgtgtggtagtatgatggcaagaatgcaaattataccgttgttagattacctttattattatagatgttttttaaaagttatttacttaaaatatctatacttaggcaaattagaggcgttgatcttgagtcgacttttgtgaccaaatttggaaacaattgcagtttgagattgaatgaggtaagggaccagctaattagtccttcctctatagatctttggttctcaaccagggaagttttgcccccaaggggacatttggcaatgttagacatttttggttgtcacatctcatggtgggggagtgctacagttatctacctggatgcttttctatattctgcaatcctcaagacagcagccttcacccctgcccacaacaaagaattatcaagcccaaaatgtcaatagtgccactgttgagttaccctgcccctagtgtttctaagatgtaggcattctttgaagtagacaattaaaaacatcatatagccaaactaaattattttgactttctgtatacttatgctgtttaaaaaacatgccttcagtttttactgagatttgatataaaaagcaacaacaaatatatttttaaagaatttaatcctgggaaacatttcactttcctgatgaattgatatatttcctcgtaactcattatgtttctattttgccttctctccctggaggcttagtgccaatttttttgctctattataacaatgaccctttattttaggcttattgttatctttctatttactgtattggtcttccctttttttttttttttttttactgttatggtctatgggtttgggctaagtgtgtgtttgtgtgtatatgaagagaacatgtgggtaatatgtaaatgtccccaatccctagaccaagtcacatctctataagatcaaatgaacagatttctaatttatattttaatgcttttttaaagtctcaatttttcaaacaagaaatatgtgcttgttataaaatattactgtgtgttagtgtaaataataagtggaagattacttctccctgttcattctctggagatttattaatatttctagtatgtgccaggcatagtggctcatgcctataatcccagcactttgggagactgaggcaggagcattgtttgaggtcaggagttcaagaccatcctgggcaacacagtgacatcccatctctacaaaaaataaaattagctgggcatggtggtacatgcctgtagtcctagctactcaggaggctgaggtaagaggatgcttgagcctaggagttcaagactacagtatgctatgattgtcccattgcactccagcctctgtgacagagtgagaacctgttgcaaaaaaatgtatatttatagtatgcagatgtgaaatagaagctataagcttgtaattctgttatggctgctcaggtttacactcttatagtttcatttctgaataagttaagtacatttctaaaaactgaggagaataaaaacaatgtcttgaggattgtgttatctgatgaaccttttattgatctgacgaagacccattttataaaaaaagtgtcatattttattttttgaagcatacttgatggtatgaaatggtatttctagcccatacttttaatgatttagaatgactcactaaactttattcaaggccagtacattggcttactcctgtaatcccagcactttgggaggccaaggtgggtggatcacttgagcttaggagttcaagacctgcctgggcaacatggaaaaaccccaactctacagacagtagagaaattaggccagcatggtggaacacgcctgtagtcccagctccttaggaagctcaggcgggagaatcatttcagcctgagaggtcgaggatgcagtgagccatgatcgggccagtccactccagcctgggcgacagagtgagatactgtctcataaaaataaaatttaatccaaatgtgattaatttccatttctctaaagttaaaaattaagtgaattccaatatcatcactaatatgcaagcttaacttttctgttacagttttcccaagcagttgaagaggaaagctattctcataattagcctaacatgcgtagaaaagtttagagattattttttttctttttctttttcttttcttttcttttttttttttaagatggagtctcgctctgttgcccaggctggagtgcagtggcacaatctcggctcattgcaagctctgcctcctgggttcacgccattctcctgcctcagccccccaagtagctgggactacaggcacccgccaccatgcccggctaatttttgtatttttagtagagacggggtttcaccgtgttagccaggatggtctcgatctccggactttgtgatccgcccaccttggcctcccaaagtgctgggattataggcgtgagccaccatgcctggctgagattgtttttttcttgaatacttaaaattgtaagattactaccatggttagttttttatttgatgttccatttatacattcgttagctctggaacatatagatcctgttgtttttaaggtctcttggttgtagagaaataagaggctttgaatttgtttcaggcttacctcatacttgaggcagtttagaaggataaatgatcagtgttcagatttcttaaagcagtattttataatgtcatgatgattatcttttcactgttactaccaggttcttttagaaaggggaaattgaagtaggacattgaagtgggactggggaggagttagcaaaaaatgtgtctgttgattgctgcttgagccaggaattggtggtaagagatgtgaaccattttagtgaagtgatttttcaaactcttttgactgcgacacacaggaaaaaattttttttacgttgtattcagcacataattcatgtatatatttatatatataataaacagacttttcaagaaacagtattttaccttactatgtgtacatgcagtctgatgtttctgttctatttgatttgaaataattgctgcttacataccactaaattgcagcttgcagtttaaaaaattttgctttagtgtactaattacctgtgtatgtggagaaattcaccctctgttagcaaatagaagattgtaattacaatacattcttactcgtatgtcttatgtgagcatttaataaatataaataaattaatgaaatattttacaggcattttgtcatgataaaatataagcagctttgcccaagcaacttggtcttttggggtcaaaaaatggcttttttgttttttgacacagggtcttgctctgtcacccaggctagagtgcagtggtgcattcatggctcactgcagctttgacctcctggactcaagcagttctcttatttcagcctctcagttagctgggattacaggcatgtgctgtcatacccagctactttttgtagagacggggtttcgccatgttgcccaggctggtcatgaactcctgggatcaagcaatctgcccaccttggcctcccaaagtgcttggattacgggcctgagccactgtgcctggctttatttttaacattatatttcagccctctttctttttaaataaaaagatgtttaaacatgaatagaaattatactaataggtcattagaaatgtaactagattaatttcgggggctttcttaatcactatattagtctaaatcttaatggagagggaaaaattagcatgctttaacccaggggttggcaaaccttttctgtaaaggagccagctaatatatacttcagtttttgtgggccataccatctctgttgtggctcatctctgccattacagtgtaaagcctagacagataagcaagtgagcggcatggctgtattccaataaaactttacttatggaaaagcaaatttgaattttatataattttcacgtgaaggttttttttggttgttcttttctccaaacattaaaaaatgtaaacaccactcttagcttgtgggctgtaaaaatcagatgatgggccagatttggcctgtgggccatggtttaccagcccttgctttaacctaaaaatggagaaaatcagtagtccagaagaataaaaatttagcaagcatagtttagaatatgagtagcaatattaaatctctaggcatatatattttgatttttgtggatattagaactatacatttttgtgttgttttttacattatattttgcagacagttgatattcataaagagaaagttgcaagaagagaaattggtattttgactaccaataaaaacacttcaaggacacataagattattgctccagccaaccttgaacgaccagttcgttatattagaaaacctattgactatacaattctagatgatattggacatggagtaaaggtaggtataatttttttcaagcttttaaaagtagtaacccataatgaaaccaactcttgagaaaattaagctttttatctgtctttctttcctagaggacaaagtcttggcccagttgtggttgtgaagattccttgctactataactgttttaccctttttgctttttcttagtgatgtattctcaagttttaaacagtcatctttgaatgaattatatttgcttggttatgataatacctcctatggtttgagtaaataagtgtcgtgtaatctttccaattttaatttaatatgactgattaaaaaatcattcatcatgttattatgaaagtgtttaccttatctcaagtatttatcagcagacttttggcattagttttcaaaaacaagatatattaatagacatgtactttgaatttttctaaaataattttatcccaacattttgggcaagaatagtgttaggtaaaagtgataggtgaattaatattgccactgcttttgagtgtgtagctattacatattttggctgtcttttaagatgtatttgggtgcctagaacatgcaaatttcatttaaattggtgtttgaacttaatgattcagagctttagctgagtattaatttatgtctgatcagtagtttgaaagacagtgacttatcagatgtgactaaataaatatacatgcttataatgatactgtacagttcatgtagttgattttttttctaatataaacatacttaaaaaacactgttatggatggaaatcagttaaatctaaatttaatggagatctaggtaaaaagaaaatatacactgtaaatttatttttaaaatctctttgtcttcagggttttgatgcaagcactattatctggaatatgatatttaatttaacttttttgagacagggtctcactctgtcacctaggctggagtgcagtggcacaatcatagctcgctccaaccttgtactcctgggctcaggtgatcttcccttgtcagcttccctgggactacaggcacgtgccaccatgctgagctaaattttttgtttgtagtgacagggcctgtctgtgttgcccagggtggtcatgaactcctgtacttaagtgatcttcccaccttggtctcccaaaatattgggattacaggtgtaagccatcgtgcctgcccaatatttaattttatagccaatacctacatgcatttagattactaataagagcatgttaaaataagatgtgtaattggatggttagttaataactgaaatttcttctaacttgggaaaatttattcaaggctaacaactgctaatggaatattttagaatacctctagaatctaatgccaaaaagacacttagaatataaaagatgacatttgtgtttgcccaattacataagaaaaaagtaatcccatttttttaaaatatataattcataggtttacatcccccattcttataatcctcaaagtaaaatgtttttctttcaggattctagccccttcattttttgactttcagtgtttaagggtcattaatttgaagaaatctttaatacagttaaattgtggaataaaacagtatcttaaattcatcagagaaacttctgttcatgacacattctgctttaaccactctttctatgatctactgaaacattattttgttaatgctgaatgcttaacttgttttttctttttttcctttctcttcacatcctgaagtttcaactaacctttcaatgctttttttccttacctcttttatttgctccatttatgcattaagtggttgcttagatttaaggtaagagattccagggctggatttccattctttgttcttatgtagaatattacatatggggagttaaagagattgttaactcttggccttttaaaacccaataaataattcctcctttttgttttattttttgtcatgcaactttgtggtgtgtcttcatgttccttgagggcagatatttttgtctgttttgttcactgctctatccttgtgcctagaacagtacctgacacacattaggtgcttagtaaatatttgttgaatgaatggttattttgtaatgttaatatattttgtgaaactgaaatgtaagctaccctatcataaaaatgttatgaaatataattagctggatttttataaatatagagactttgttatgaattggagggccaattaatgtactttatttaaccctccccctgtgtaatagcctttttattctataaatggtatgctttctgatataccttatggacaatatgtcattatcttttaatcagtataaagaaattgagaagcagaaaatattcagtgacacgggttttttttttaagttgcagtatcatattttgtagaaaaattattcttttttccaaatagctgtataaagaatatatttcaatataaactgtaagagcttttaaaggtgaatataattatatgcaaaacatcaaaagctcatgataatgtttaacagaatatcagttaagaattagagatatttcctgttagaattcgtttcaataatgttttggtatcgtggaggattcgtgataaaagaaattcaactatattcaagaagcctgcctaaaatacaaggttactacaattatatacaaaacttagcatgcatttcttctttgatttttttttgtaggtgagttttatagtttattttcaaatatatattcctcccatctaatacccattatttgccatatctttagtgtagaaagtgatgacaagatgactgagctctgaatcattaactagtactaactaaggccacacaactttcccctgcccgtggtaggtagatttgattggaagagcccaggcatatggacacctgtattattgattggattgttggttccaaatcctcagtcatggtgagtaagatgtggaattgtgaagaaatccttttgcttgaaataggtgggttgcagtgaactagaccaaaagcagactgtggctgctttggcccttttaccctaaagtctgtattcaaattttgaccattgatgtgttaacctccaaagtgatagaaatacacggaaagtttaattgaagaaaaaatacagaaacacacagattctttacccttaaagtttagactagcttgcccaagctactatctcatgcttgttttctctaagccccagtatgattccttcttgatgttcctgcgtcaggatctgtttccattgtgagagacaggccaaacagagtctcctagaaagatctaatgaagaatcacacttagataagatccctgagctttttggagacctgtggattctagcaagtgtcttagaagtctcctgatgagcaatagcattatggattccttatcctcattttaatcagggtagctgattaaatgttcaaaatttaaaacctatttaagacctagtcgtttttctttctacttctctttttctctttctcagcactttttgagctctgtctttgctgctcccattgctgtcatactttttatacttttcagacagtctccagagaaagtcatcatactttaggaccagacatgtgggatttgactcagaagagacctccttgtttaaaagtttaacttttactattttatacagcatgtttgatgcttaattgttcttgacatctgaaatttggattaactgtttttcttcagtcaagttacaaatttaagagttcataagatttttaaaaacactatggtaatagttttatagcaaaggacgtacaaggtcagtggatagaatgccatattggaggtgttttcatatatacctaaggccatataaaagtggaatgtaccttgaactggttcctgttccatactcttgtttttgtttttgttttttttttttttttttttttttttttttttttgagacagggtctcactctgtcacccaggctggagtgcactggtgtgatcatgactcactgcagctttgactgccctgactcaagtggttctcctgcctcagcttcctgagtagttggtactacatgtgtgcaccaccatgcctggctattttttaacaaattttttgtagagatggggtctcactgtgttggcctggctggtctcgaactcctgtgctcaagccatcctctcacctcggcctcccaaaatgttgggattacagttgtgagccaccgtgcctggccagtactcttttagtagtaaaaagaattttaagaccctgttactgaggtcagtatgatgtgtttgtaatgaatttttctgttgaatgcattaaaattgtcactaatgaagctaaacttaagtatttttaaaataagcatattagtttaatcaaaagtaataaaaacttctgacttttaatgtattatttcagttgaacatcgcccaagcagattcttttttttttttctttttttcttttttttgagaccgagtcttgctccgtcacccaggctggagtgcagtggcacgatcttggctcactgcaacctccgcctcccgggttcaggcgattctccagcctcagcctccctagtagctgggattgcaggtgcctgccaccacgcctggctaatttgtgtacttttagtagagacagggtttcgccatgttggccaggttggtctcaaactcctgaccttgtgatccacccgcctcggcctcccaaagtgttgggattacaggtgtgagccaccgcacccggctcagattctttttttttttttgagacagtcttgccgttgcccaggctggagtgcagtggtgccatcttggctcactgcaggctccacctcccaggtttcacgccattctcctgcctcaacctcctgagtagctgggactacaggcgcccgccacctcgcccagctaattttttgtatttttagtagagacggggtttcaccgtgttagccaggatggtctcgatctcctgatctcgtgatctgcccgcctcggcctcccaaagtgctgggattacaggcgtgagccaccgtgcccggccagattcttaataattaatgagcagggcttaagagttttacagccagcaaattaagaatataatacttttaaaaattttgcttaagatcttgaagatccatcatttagccccatgtttaaaaaatggactgttttcacttgagtactatttttagcaagtatttgtcattccttacagaaatatgataaattccccttatatttctagctttcaggtacagttgaaggtacactcttaaaaatttatccgacacagcacctggaggaaaacctttgtagtaacatcaacctttgagagacccatctgtttttgcctataagttccaaccttaagccatcaattctgttttgacaaaagccagttgttagaatctgttttcaaaatcaagcaggagtttgtccatctttatttctcttgttttcttctgctttctttacctgtttctctttcctcttactcctaatcttatgttcccttattctctgtgttttattgttggactcttgactcgataggcttttttgtcttttaaccctttttctaaaaatcttaacctctgtcctgaatttatactctaattcctggtttcagctttgattttcctcagaggatcttttggtccttttcctggtgtcccttaggaattgaagtaggaacatacatcctctgaagagagggatagaggtctctagaaagccaaataattatgtactagatgggactataatggggaacaaaactggacagagaatgaaggcccaaaggtgactgacctcacttttttcccatcctcactatttcacatacagacacaacctacacacacttcccctcttctatttgtgtgtttaaattctcttttcttttttttaaagagatggggtcttgctctgttgctcaggccagagttcagtggcatgatagctcactgtatccttgggctcaaatgatcctcctgcctcggcctctcaagtagcgggactacagccactcctggctgttttttttttttttttttttttttttggagagacgtggtcttgctgtgttgcccagtctggaatcctgttcttttaaaacttaacaagtttaagaaattattagggaagtttcatagagaaaaaccagctcaggtttttctctatgaaacattccgtaaccttcccacattgatatttctttttttttctatagaatctgtagacattgctttttttttttttttttccacgtggagtctcactctgtcacccaaggtggagtgcagtggcgctatggctcactgcaacccccgcctcctgggttcaagtgattctcccttcctcagacttccaagcagctgggattacaggcatctgccaccatgcccggctaatttttgtatttttagtagagacagggttttgccatgttggccaggctggtctctgaactcctggcctcaggcgatctgcccaccctggcctcccagagtgctgggattacaggcatgagccaccatgcccagccagacattgctttttattttaggcatgtgagtcttatttatttcagaatacctttaaagcagagaaatcattctatagaccgttttgtctccttttttttccccgcaggctcccttccttttttttttttttttttttccccacatgcctttactcttgtacctagagggtctagtaggagattaatatataaggtgtataccacacataacattttaggatgtgtctgccactgttctgtggtagtaggtcatctgttaatgggagatttcatagcagaggtgatgtcttctatgaattagagatacttggctgtccaggcatgatatttgtaatgaatattatatcagtattcaaggaagtattgaatgtaccaaagaaggtagagcaggataggtaggagcattgtagaaaaagtattaagtcacaataattggcttaatgtgtggtgccagttgtagtgatctccaaagcctggtcataaaggaactgcttctacctccggtggtatttgcattccttcatcatagcctattgggaaagtgtttgagctgtggccatgcattaaccttcatcacctaaatgaaatatttcttctgttttggaggtttctgtctggtagggaaaaagtggggacttttccaacttttctttcttgtacctaatacctgcttcacttagctcttgaggtcttttcattttatggaataaaaaaatacataacaaaattatgattggtatcggccaccagagtattgttctaatttcctaaactgctgtgtgtgcctgatgatagttctgctatgtttgtaactttaaaaagtatttcaagtgaaattactattatgaagtggctgcagtattgctttgttttccttgtcttgagtttatggtatatgttctgtctctctctctgtcgctgtcgttaagttcctctccatcagcacatagagatctcatgttttgctacttgtcaggaaatgttttctctcttaaatacttccctcaaaatagtttttttaggatcaatcatgatggctgtctagtaaatatatttttatatttaccagattattttagttctgaaatatagtttaactttaattataatatagattttacctattataaaaattgttttgtttggcatttatttctgttcttccttttcttcaaatttgatggcagtatttatattctgcatagcatatttattgttttacttagcgtagaaacatttttcacacgggaaaagctgccttgaggaaatattgaaaaactcttttaatagaaaggtaatgaaatattaggtataaaattagattgtttggacattctacagagactcttgtttcttaagtgacttatgttagtcatccaatcccattaaccaaacaaatatacagtcatttgatgattctacagatcataaaatgtaccaagttatattcatagaaatgttggccaggcatggtggctcatgcctgtaatcccagcgctttgggaggccaaggtgggtggatcacctgaggtcaggagttcgagactagcctggccaacatgacgaaaccccatctctactaaaaatacaaaaagtagctgggcgtggtggtgcgcctgtaatcccagctactcgggaggctgagtcaggagaattgcttgaacccaggaggtggaggttgtagtgagccgagatcaggccattgcactccagcctgggtgacagagcgagactctgtcttaaaaaataataataataataataaatgtccaccagattttaatatatagattgtttattttatgctattttttttggtggggggcgggtaggtccaaagacttacagaagatactgcaatttaaacaaaaacaccttgcataccaaaacttaaaacaaatataagctggaaagctcttttcaaatattttagctatcccatgtatagaataaaattctctcttaaattcctgctccttttccttcctgtttctcagcaaattgatgtagttttagtgtttggttcacttctccctcatcacttaaagtaactttgggttttatgttgtttaaggttgagcttaaaggactttggttaccactttaaaaaaatcttctggtttcagaaattaagatatgcagttttaaaagctattcattatttgtcatattactcctaaaattttccccaaatgtggattgatttttttaaaaaaactttttctggcattttcattttaagatacaagtagtataccctccgcttattaatgagagggagagcaaggataagttaatctttactcttacttgataatgtttgtttttattgtttaaaagcaacaacaaaaggattacagataaatgcttcactttaaaatattgacatttcaaaggtatcatttgtcattaaagattgttttaacatcacacacaacttgttcactgggctattcatttgaagaatttgtttcttgagatagtatttcttgcctattcaaataacaggtagtattttaggattttaaaaaattccacttaagccagggttggttttgatagcctcacttctctgtatacaattatgatttgctttcttaaaatttatattctgaagttacagttataaatgtattctgatttcaatggtatgatgtcttgcaattttatttagaaagtataatttgactactctagccatattatttttagaaaagttgaggtcctttttcaaaatatgttttgaagatggaaattcaaaatattagggtcttaaaatagaatcacatatgaacctgtgtggtgaacattaacccattggtagtctcaacttgagactgcatttgaactacacttgtgagtgatttttcttagctttttgagatagccagggctttctgtataagtgctaacatactcctttggtgacctccattattcccagattatgcatctttcctacacttgcattttcagttggggatagaatagtgagtggagttacggtccagctctgacttaggactatgttacatctttctcatgcctgaattcaccttcagtttgggcccaagtgggtccaattcccattggaactaggacattgcctgtggcccttgtgctgctcccagttgaatgggatacctcagccctaactttctggttcagatgtttaggaacatggcttgaacttctagcagttttcaggtaggtggttccctcataagaagatactaactaaatctgacttataaggctggcccacaatttaaaaaactaaaattttctgtatatattacatgatttatctttatattctctagttacagtggatcatatgcatagttgcatatttttatttgggaaatgtattttgcttatgatatgcttactatctaaagaaagttactggccgggtgcagtggctcacgcctgtaatcctagcactttgggaggccgaggctggtggattgcctaagctcaggagtttgagatcagcctgggcaacacggtgaaaccctgtctctactaaaatacaaaaaattagctggtcgtggtggcatgcacctgtagtaccagctacttgggaggctgaggcaggagaattgcttgaacctgggaggcagaggttgcagtgtgccaagatcgtgcccctgcactccagcctgggtaacaaagcgagactctgtctcagaaaaaaaaaaagaaagttatctctaaaaataaggaattgcttaaaagcattattgtttttgattgagttactctttattaaaactaaaattttgtagttattctatttaattttaattgaatgtaatatcaaataatctaaccagtgatctgttggtgtgatggcctaatggcaaataaagtctttgcatacaagtttataatgatttgaaaatctcatgttaggaagagtcctttgagtacaactgtagagtaatagtagagtagagattgcatatgaaatgcatggcctctaatttttttccctttatttaaaccttcccctcctttgttatgtagtgtagcatattatttcccaaaagtgccactttatttcactgcatacaagttgagttttccttaaaattttttaggtgagtacccagaacatgaagatgggtgggctgccgcgtacaacacctccaactcagaagccccctagtccccctatgtcagggaaagggacacttgggtgagtatataagtagtaattgaaaaccatttcatgtagtattgtttaaaaatgaagcacaacatatttaaattattttttgaatatttgaagagagaacattttctttgtaggattgttgtttgtgtgtataacttcctcttctcttgggaaacacatttttatacttcagaaagatttgtttagaaattgtttttctagtgaattttaaatttgaggtaaaatcctagcccaagttcatagtttattgtaaattgcagtctaattttaattccttttctttcagaaaatgtatatagtcttttatattacagtttaactccaactatcctttttaagctgtgtagattataaaattctataaaacttataagaatattgagcttcaggccaggtgtgttggctcatgcctgtaattcccaaagtggggattttgagagaccaaagcgggcagatcacttgagcccaggagtttaagaccagcctgggcaacatggtgaaaccctgtctctacgaaaaatacaaaaataagctgggtgtggtggcatgcacctgtagtcccagctacttgcgaggctgagacaggaggatcacctgagcccaggaggttgaggctgcagtgagccgtgatcatgccactgtgctgcagcctcagtggcagagtgagcccctgtctcaaaaaaaaaaaaaaaaaagaagaatatggagctttattttggtcctagagttgggctctagatttgacttttggcaaaaatggccaattaatggaaaagcttgacttttttcttctagagcatcgtattataaacttgacttactgtgattgagatttacgattaggttggcattagtatagcccagaagccaggtgattaaaattctgtttcagctgtgctgttactttataattcctacatagtcagctgccaagaattcagttttttcatctgtaaaaggggggtaatatttgtcctctataaatttttcaaggtcactgtaccacaaattggatttttaaaaatgtgtaagacaaagacaaaatgttttgacaaccattggctttatgatatatgctaaacaagtttttaattgacagtcttgtttttggcttcctcagcaccaccaccatcaccaccaccaccaccaccaccaccaccaccaccaccaccaacaacaacaacaacaacaacaacaacaaaacaaccacaaaccttcaaaaaaccgaaacccaatcaagcactgaatcaggataggaccaaatgatttgagatgtagtggaggatagtgctggaagagagataataggacagtaggagaccaaagaataaaaataaattccaaccaggaataggatgactttattaggagtggacaaaataattctgcttagagagagagaaaatctagtggatcaaacaagatttaaacttcaaggtagaatgtagatggcatagtagtgtataatggtgccaggggtcggggtagagagatgaagaggaactctgtttttattttcctatgtaaacatttacatttatatcatgtgtagtgccttatggattttgttgggttttaagtcaagattgttagtaagataagctacttagtccccagaaagtccctagaagaatgaaactttgtgttgttttcaagttttgaagatttgctcatataccaatgtttgttttccttgtatattagcaatggttctgcaagatccttggggaccagagttgctgaggcccactctgctagttgatggctataacctgtttttccacatagtctttgcctagtcaccacattttgttcctttgctccttttttttttaaaaaaaatcttatttgtgtcattgccttcactctgtagttctcaattatcaaataatttttacttggatgcaacagaacttatttttttgagacagagtctcactggagtgcggttgtacaatattggctcactgcaacctctgccttctgtgcccaggcaattctcttgcctccaggcgattctcctgcttcagcctcctgagtagctgggattacaggtgtgcgccaccattcccagctaatttttgtatttttagtagagatggggttttgccatgttggccaggctggtctcaaactcctgagctcaagtgctctgcctgccccggcctcccgaagtgctgggattacaggcatgagccactgcacccggctgcaacaaaacatttttattgcctgggaaaaattgtctgaaaattagatgttggagaaattaatgtttcccattttattgtttaatatttgcattataatttaagagatgctggaacttccttttagtattttaaatccaaagtcctgacattactttttcctcttttgacccaagatttcatccagtgtcccttattttatttttaattaccaatgtatgtatttatgtaaggagactttgaagggtagtagagtaaattgcaaagtgatctcatgcaaaatcagtgatccataacttgagtgccccaggaaagcaatagttaaaggaactctgggatccatacataagtcagtagagcaacatcatttcaggaaaagaaaggtttttaattttcacatcttgatcagttcttattcttttagtgaccaagatctcatctacaatatgtcaattgactgtttatcattgtcataaagaatttggaaacctaagtagaaatgagaactaatttaataaacactaatttccccatgtgcatcctgttccctgtcatatttcctttcttcctcttttcatcctctttacgaggaaattttgggaaaaggcgggaaatatgtgttaataaaatccagtctggtttgtattttacagttcaaagtaaataatatagaaaggctgttgtggtggtcattcccttccccccacctttgtaaatgttgaactctgaggaaggaaagagaaaagagatcaaggtgaaagttgagggagaaagtgagaacggaagatgagattaaagtgtgtatttttgtatatagatatactttaatttctgtatatttggtatatagaaagggaaatgagttgttatggctagtattgatcatcagtgtgggggttatagatcctaaatctagatttgtagttcctgtctttgaatatctttggttagggagagaagggagaggagaataattagtgcattcatgaagtacagttgggagactttaatatgatactaaaagaattccaactcttctaagaagaggtagggtctgggaaacattggcttaaatggtagagaacctttgtgctctttgagaataaatgaacaaaattgcattagcacagggaaatgaggttggagactgaaaaataacaatattcaccaaaaccctaatggtggagaagtgatacattagtaaagactgaaattggtagctgggttatgttaaaacacatttcctatctctgattacaaattgtatctcaactgctggcaactctttgaatttattgtgccgaaacttgcttaatcatacaatacatacgctcttctttttgtaggcggcactccccctatcgcacactggagccagtgcgtcctccagtggtaccaaatgattacgtacctagcccaacccgtaatatggctccctcgcagcagagccctgtgaggacagcttctgtgaatcaaagaaatcgaacttacaggtattttctctacctcagtgcaaaatgtgatggtcatagtaccataatctgttcagattacttcaggtaaatctctcattttccaagcactaagttcttttcctcactctattctcccaaacctcatctgatttcacctctctctcctcatgttctgattcaactttgagcagtcaggaagttgataaagaacagacatctcaaagtgcagacttctctccaagttttaagagttcagttgatctggaaaaaaaattatggaccaaatgtgggaaatgtcaggttgttttttggtggaactttacagatgaaaaactatacataataaaacattaatatgggatagtacatcagagtatgattattaattaaaattactcaaatctgtttaggaaaatgtttttgttttattataaaagaagtttcttcagataggcattaaactggaatataaaaaggcaatatttattgttttaatgtgttaaacctcaacatttatcacttgtatttatggataattttttcaaaatgtggtcaaaacaagcttattgaactcagttttcccctcaactttattaataagtaaatatatatatatatatacacacacacacacacacacacacacacacacacacatttttttttaacctgtcactgacttggagctcaaggaaattttattttgaagtggtacgcttttgaattacctttattgtagctacattcatctcagaaaatgtcgggaagtgctgatgatctcttactgtttataaatactcatgttttggtggctcttatttctttagcagcagtgggagtagtggagggagccacccaagtagtcggagcagcagtcgagagaacagtggaagtggtagtgtgggggttcctattgctgttcctactccatctcctcccagtgtctttccaggtaaaacattcatggtgcctcgtcttcacttttcctttctgaatttgattcaatttgtgatttaattatggtgggctttcttcgtaatcaggattttttttctttaggaatcataaatattgggaagtctatatatttgttatttgtaagcaagtgatttgtaagtgtttgctcactttgcacttctctttatgcctttggtgatgtggctcagttgctgctttgaggtttcagatcacactttgttatgagtacaagtttaattccagctagtgttatgacagtgcagtctttggacacagtgggaactcagtgtgagaaccatattagtaacaaaggattgggcagatataaaaagtagttttgacagttaaatttagtggctgtattggaatttagtagtctctgaaaatactaccctcttttctctgaaacagaaaaatctgcttatttgattcgaggagatacacacttaaaacttagttttgaaaacgtgacacaaaatacattaatagaatgttacatacttaatttacttatagtaacaagtagataatgccttttaaaaatcataaagatttgtgttttaaaaaaaatttttaatctgataatatggaatatgtctattttctgatttgtgtaattcaaaatggaaaactgttgttttttagtgtattatgttagttttgtatactatatacagaatgttatgctaaaaataacaatacgaagggaacacttttcttctggagtagtgctttcaattgaaaaggaatgtttgtttttaatgaattgaaaaaatctgcacattaccctgagcatcttgaattatttgctgcttatatagtaatcctttagcataagttttattctttttttcaactctgttcttttggttagtgttaagcactgaatatctaacattaaatactctaataccttttctaatcctgcctcatgtgattgcctcattaatgctgcctcttactcctctttcccctcagcccctgctggctctgctggcactcctccccttcctgctacttctgcatctgcccctgctcctcttgttcctgctactgtcccttcctccactgccccagacgctgctgctgggggtgcccagacccttgctgatggcttcacttctccaactccccctgttgtttcttccactccccctacaggtaagtatttgcttattcattggcaggcagatgcagtcatctggctattctcttacttgcacctctgatttttgtttgtttttggttttgttgtacttcgtattaaaaaaaaataagaataatgtactaaccagaaagtatgtgaccaaagattagcatttcctgagaaaattgaggtaaagtttctcatacatttttccaatagggtagcataaatttgtgtttttttattgcttgaatttcatttattagagatttttaagtttaatatggagctaccttctatacagtttttggaaattatcattagaaatattttcattataggttaagtgattaacaaaagtctattacaataattctaaggtatattttataggaaatatttgatacaacaaatggaaagcctctgtaagtctatttttaacagaatctgttgcttattatagcagcattggaaactcatagacaatggacttttaaagaatttcaggtttatttaagttggctggtgttttaaaattgcaatctaaaatctgttttgattggggaggagatagactcaattgctacgaaatatatttgtagagttaatgatgctggctagtaacaggttcttgtctgctataaaatgtatgtgtttggacatatatcactgtattagtctgttctcacattgctataaatacctgagactgggtaatttatgcagaaaagaggtttaattggctaacggttcttcaggctgtacaggaagcatgatagtggcatctgcttggcttctggggaggcctcaggaaacttacactcatggcctaaggcagaggggaagcacactggtcacgtggccagagtaggagcaagaggacaaggcgggaggtgctacacacttttaaacaaccagatctcattattgcaagaacagctccaagggggatggtgttaaaccatgagaaaccgcccttgtgatccagtcacctccccctaggccccacctccaacattggggattacaattcaacatgagatttgggcagggacacagattcaaagcatatcaatcaccgtagtgttccacttgccagtgaagaacttcatggcatttatattcagctttgctgttatacatgttaaacatatataagatctttacatgttttaaaagacacttttagccaaaatggattttgggtgatgtcttgtgggattccttctatatgacttttaaagaaaagctttctgcagtagataaatgtaaacatggggtgttttttgatccagatacaactgttaggccaaactaactagttaaatataggaatctcgttatgctcctgctttgataaagaatgcatcagaaaggacaaatcacccccaactgagagtctatgttttagtaattaaatattaattgaataacaggtgcctggctcagtgttcactaaataaacatttgttatgtgaggggataattaactgtggtttttaaaacaaaaagcaaggtaaatgtcttattaataatttatatcaggatagtctgttttatacagtacctgagttaccaagcaattgtttttctttttaccaaggtataacttatgtacagtaaaattcaccctttataccatatatgtttgtgagttttggcaaaggtgtactgacatgtaattgccaccacaatcaagttacagaacagtcctatcatcgcaaaaatttcctccatgccccctttatagtcagtccttcccttccactcccagctcctggtaagcccttgatgtgttttttttctctaaagttgtgcctttttaagtataacataaatgaaagcatatagtatgtagcttttttgatctgttttttttggccagatgcatttgagaattacccatgttgttgcatgtttaagtatttcattacattttattgcttagtagtgttgtattgtatggggatgtaccacaatttgtttatccctttctcagaggacatttagatttttctagttttgagtgcttatgaataaagttgctataaacatgtacatacagggttttttttgtgcacatgggtttttatatcaggtaaatacctagggaatagaattgctgggttatattgtaagtaaatttttaacgtcataagaaactgccaagttgttttccaaaatggctgtataattttacactcccagcagcaatgtgtgagtttccagttgcatccttgtcagcccttggtgttgccttttttagctttagccattccaatacatgtgtaatggtttctcattacatgtgtggtttggatttgcattttcttaatgactaatgatattgaacatttttttcatgtgcttatttgccatgtgtatatcctctttggtgaagtatctgttcaaatgttttgttccttctcacctttttaatagggtttttttccttatcattgagttcttttatattctaaatatatgtcctttatagattatgagttacaaatattttcttccattttgtgattcgtttgcttattttctatttttttggcggggggaggaggggcgggcggacagagtttcactcttggtgtccaggctggagtgcaatggcaggatctcagctcactgcaatctccgcctcgcgggttcaagcgattctcctgcccagcctcccaaatagctgggattacaggcacccaccaccatgcccagctaatttttgtatttttagtagagacggggtttcaccacgttggccaggttggtcttgaactcctgacctcaggtgatccgcccgcctcagcctcccaaagtgctgggattacaggcgtgagccactgggtccagcctgttcatttatttttttgatgttgtatttcaaatagcagaaattcttcatttttattaagtgttatttttcaaaatttttttaaatgaatcgtgctttgatggcatatctaagaactctttacctgaagtcataaagattttgttctgtgttttcttctagaagtttttagtttcaggttttatcgctaggtttatgataattaggtatatatatttttaaaaccccaaatggtaaatcgactcattaatagtgtgaatagtgtcttttttttttttttttttttttttttttgagacagagtctcactctgtcacccaggctggaatacagtggcaatctcggcccactgcaatctccgctgcctggattcaagtgattctcctgccgtagcctcctgaggagctgggattacaagtgtgagccaccacacccagctaattttttgtatttttaatggagacaaagtttcaccgtgttggtcaggctggtcttgaactcctgatctgaaatgatccacccgcctccacctcccatagtactgtgattaaaggcctgagccaccatgcccagcccatgtgaggttttagactagatctaactatataaaattcataatgatgttaatccagatgtttttaacttgatcgtaggtttgtattagtttgctatagattaattactgaaatgctaattgtattcagtggttcaaataactaaatatgccttttaaatcatagtttatatgttttcatttttatcatggttacagaggcttctcagttgatagtggattatgtttaagcttgagtgcttaagtttttgatacacatgtaagatgtttaaatgttataacaagccttgagtgctcttataatccttatatgactccatatgaatctaagcttggtaaactttcagctcctgtagaacaattttagtcatataaaaccattttataatcatagacaagatgaaaaattgtcaaagtgttgttttcctctaatacttttaattaaaattaccaagaagatagtctcatattaaggtagaataaagatggtaagactcagctgagaaatatgaagcctggaagaggatatgactgcagtgtttgatcatgaagatttcaacaaatcaagcattcatcaaattccatattacataagtcttatctcactgtgtttcaagtagtttattttagaatttaaaaaatttcaggataaccttaggcacaaatggatagatgagtgtgccaggtatcatctgttcctccagtcccccctcctctactctcccctcttctccagtaggctgacctccatgaaatgtttcagtggattcttttgccctctggcttcctgttgggtttagcaaaagtgttttttttttccttttcacttatctcctccttttctccctttctctttctcctttcctttcccctctgctatcctcttgccctcctccaccttcatctcctcctcctctaccttcctgtcccctttccgctttcttctccacctgcttatttctccgcctcctcttctctcttgccctccccttctcccttgtctgctattgtgctctctcatgggtgctgtggtgctctgtctgtaagaaaaagttctcagcttaatgtaggtgggagtgcagtcaaggtaaagtttagggagtggattatattattaggaaactgatggattatggaatcatgtctccagttgacattagctgtggaagaactctcaagagagcaaaatacagtgaaattgatgataactatatatggacttagggatgatattaaaaataagatatattttgaccctctttttatatcttaatttttttcatgattgtaaattttttagattttaattttaagacaaagtaatgtagctttcgtggtagatttttttgattaaaagaaagaaatgtttgatttggaattacgtcatttaaccttttgttgaaatacttcattttcctttaaccatacttttttgctaccttacgtttattattatttattattttggaataagactgtgtgtcaaacattttttctcttgctttcccaaacatcattcttgtcgattttagttttcagtgttcagtggctgtattttgggggtggagtagataaattttaattaattgtgatgattttgaaaccccatcagatttttaatttagtgaaataatagtgttaagtagcaaactatttatttattttgagacagagtctcactctgtcacccaggctggagtgcagtggtgcaatcttggctcactacaacctctgcctcctgagttcaagtgattcttacgcctcagcctcccgagtagctggaattacaggcgcacgccaccatacctggctaatttttgtgtttttagttgaaacggggtttcaccacgttggccaggctggtctgaaactcctgacctcaagtgatctgcctgccttggcctcccaaagtgctgggattacaggcatgagtcactgcacccggccctaattagtaaactatttagacataactttccaaacttaatcatatttttgtttgcttttctgcttttgtactctgatataatatcagcgaacaataactcaccttgcattgtatatttcagataccagttaaactagctgttatttttaattcttaagatttaggcattgtacataaagtatttaatgatctgagataattttcttttaatgacatatgtatgttctatctctttttcaggtcatcctgtacagttctacagcatgaataggcctgcctctcgccatactcccccaacaatagggggctcgttgccctatagacgccctccttccattacttcacaaacaagccttcagaatcagatgaatggaggacctttttatagccagaatccaggttagtttttttgtttttttgcattctatagaatgtatttaattaaaaaccttcaactacaaaaaacccttaattacaaatagtgcatggtaggtggttagcaccatttgttgaatgaatgggagaatgaatgaattgtaggttgttaatactgtatctttcaattctttaaaaaaaaatcagtatgtgatttccacgtaaagtcatacaacttagtttttctgagcagaatttttttgaatattttagtggttatttgctttttaaaataacattgtggtgaatggtatttcctttttatttaatcagacatccttacttttaaataacaaataatgaaagttgtgtgcacatgaacagaatttagaagtggcaaaggaaaagagaacatttttgaagctactttgtgctagggaattatactagcttatacaattctcataccaaacccatggtggaaaaactaggaattgggtaaattgaatcagatataataattacactaaataatcggttgtatcatgcatgcagaataactaatctggaacatatttaataattattattttgtttactccccagagagggcaagaacaaatattagacaccatggctattgtggacatggtatgtcaacttactgcttttttctgtatttttgccaggaagccagtaagcctatgtgtgaacacctctcatactgggttcaactcattccatttttgataagccttgaattttatggagctgcagtttgtctctgtggctgtgacctatagtgatattctttgaaagagtcttgcagaagaaatttgatcctccaacataaacacttaatttaaataatgtttttatattatctcatttgattcttagaatcacgtacaaaataagattggtgatcattttcttatatcttataggtaaggaaaatgaggctgaggtgatggtcaggttaggatttgaacttaggttttctgactctaagttccatgttctttctttctgttttttttttttttttttttttaaattgagatggagtctcgctctgttgcccaggatggagtgcagtggtgtgatctctgatcactgcaatgcctgcctcctgggttcaagagattctcctgcctcagcctcctgagtagctgggattacaggcacccacgaccacacccagctaatatttgtattttattgtagagacagggtttcactatgttggccaggctggtcttaaactcctgaccttaagtgattcacccacctcagcctcccaaagtgctgggattacaggcgtgagtcaccgtgcctggcctaagttccatgttctttctattgtcctacctacatatttaaaaaatttttctcttatcctcccaagtcttctcttttttggaggggaaggcggatgaaaagatgtgatataaagtgcatgaaagcctgagaccttgtcagtcttttatacagttacatcctggaatattgctcaggaactgtttgttgaatgccaaatgaatcccttgttcatttttccaaatcccttcactgttctgggtccctctcgtaaattaagtgctgtatctgtagtccatccagtgcaaaccatagtgtgaataccaactgccttaattgatatatacttcccttctatcttttatcacgtttagtgtttttggctatgccattctttttaaatcattctgaacttaaattttgacaaaactgccctttttatacatttgccttttaaaccatgttttcaaactcacatttgttcaggagcacgggattacaggtacctgccaccacgcctggctaatttttgttttgttttgttttgagacaaagtcttgctctgtcacccaggctggagtgcagtggtacaatctcggctcactgcaacctctacctcccgggttcaagcgattctcctgcctcagcctcccaagtagcagggattacaggcacctgccactacacccagctaatttttgtatttttagtagagacagggtttcaccatatcggccaagctggtcttgaactcctgacctcaagtcatccacttgccttggcctcccaaagtgctcagattacaggtgtgagccaccgcacccggcctatacagggatatttcatgctttgttcgtgtatgctccaaaatagtcctatgagaactctgtaggtagaatttatttgaaggctgtttaagcacatatttaaatgcattttataatacatacttcaatagtttctttgtaaatctgattttcaaatgcttgaaagtatatgttaaagtaaaaagatccccactttatggaatgattttaatgaaaagtatttttctcactcatggaagtaaggtgaattgggattgttaggctttctgtgtaatgtgtgagtcaatttagttgtgcttttttgtttttctgtactctgctctattaagttctgcctttcatctccagggatttgataactgtttaaagtgggtggccacagcattgttagttggttaatcagagtactttttgtaaactaatttttttttaactaaaccattttcttggaaaagctctttttgcaagacttaatgatttgtgaatcagtgttctaaggctgttagatgtacttttattttatattcattagaatattatttatgagtcaagcactgtggcaggtgcctgcagtcccagctcctcaggaggctgaggcagaacgattggttgaacctaggagatggaagtttcagtgagccgagattgtgccactgtactccagcctgggcaacagagtgagaccctgtctcaaaaaaaaaaaattatgtaagtctcctgtattactcccagtagccctgcaattgtccctatttttttcatatttacaatgagaatatttgttgtgctttctcaagtaactaattctctgatttaacaaaaatgatctgaagtgtgtgttttatgagctttttttttgggggggtaattggagtcttgctgtggttgcatgcttctgaggaagtgagctgacaatctttggaaggtttcatgtgaatataaattcagtggggttctgtgaggtgtaaatctagcagtgctgttactatatttgttaatgtacaatttgatctgagtttgaaaaagggcaattataacataggagttaaaatatggaacacccagtgtctagtgccaagtcttaggagcacaataattgtttttttcatgagattatttcagaaacaagttattgaaaggaaaggaaccctttgatcagggcataactgaaatccctttggttctcattatttcttaatctaatccagccaatgaaataggaataccaatttatcattaatcttgccagtggtaaggagggggtcatagaaacacatagggctaattatgagttaacagtctctactttaaatgtaaatatgaaacaccttggtggtcaagaagaatatacatatatctacatgtgagtatgtgtacatatacttacataagccttgtttgttaaggaatcagtaatgtagcatgtaagtattgaagactttaggagaaagtagcctgtattttactgctcatattttcttaaaagcttttgaaaaaatctagttcataaagtgaatgttggttccaagagatgtgtctatatatagttctatgagatataggagtttctgaatgggtatgctgtttcacaaagagaaagtgtcaggcttagtaacccctgaatggttttaaaagcgactaaaaaaataggaaacaatgttgggatggtgctgttccaaaataaaaagccatttcacatattctctaaatgatttgtgaagttacagcatcaccataaatgtctaaaacgtctagaagaatactgatgtgttggggctttagcaaagtataaataaagagcaggagcaggaagatttttttttctccccaaagtcttgctttgttgtccaggctggagtgcagtggcacaatcttggctcactgcaacctctgcctcctgggttcaagcgattctcctgcctcagcctcccgagtagttggaactacaggtgtgtgccaccacgcctggctctttttttttctttaatagagacaagctttcaccgggttggccaggctgatctccgactcctgacctcaagtgatccagttccatctggcgtaacaaaggtcatcccaaattctacttttctccacggcaaacctttaacaaggtggtcgaaattaattcagataccacatccttttctttttggaccatgtaagatctcatctgactagaatgtctgtgagccagaatatactgtctttcttggagttgagctgaaaacaaaccattctaagagaatttaagcagaattttgagcaaagaattgttgcaatattcagttctaatcctagtcattttgttactgctttggcctcccaaagtgctgggattacaggtgtgagccaccgcatccagcctgaattcacttttacataccttttgttctaagttggtattcatgtttagaaaatactacacttacacattgtttatttccttcactgggaaaaaaacataagcatctcaactcgcatgggctatataatatatatatctcctctaaatgtgatgttcagtaatgactttagaagtagtttttagagcgcttattttgtctaatattctcagagtatttataaagctgtaaaaataagatgtaaaagcttaattttatttttccaaactttttgaattggacatctaaaatacaagcttcattgatgcttcagaggactttataaataaccaggaaggttgtacttggaaagtctgtacatttcatcagcacagattcatcatttaggtttggattgcttggaaagccttttactgtttatatctaaacattcttgtatattgtgaaaattacataacaatctaagtttggagatcttttggtggttattgggaaagagtcttgtcttatgaggaatcattttagctaaatgaaatgaaaacaagtttgcttcctgctcttctttgcctgttcacaaaatgactaggattagaactgaatattgcaacaattctttcctcaaaattctgcttaaattcacttaaaatggtttgttttcagctcaactccaagaaagacagtatattctggctcacagacgttcttgtcagatgaaatcttacaaggtccgaaaagaaaatgatgtggtatctgaattaatttcgaccaccttattaaaggtttgtcctggagaaaagtagaatttgggatgacctttgtaaccccagacggaactgaatttttgaacatgccttagactagctttgaaaaaagtctaacttgttaccaagtcattcttttaaggaagaactgcgattgatctttccctggctgctggtggacttttttttttttttgagatggagttttgctcttgttgcccaggctggagtgcaatggcatgatctcggctcactgcagcctctacctcctgggttcaagcgattctcctggttcagcctcccgagtagctggggttacaggcacctgctaccacacctggctaatttttgtatttttagtagagatggggtttcaccatgttggccaggctggtcttgaactcctgacctcaggtgatgcgcccccctcggccttccaaagtgatgggattacaggcatgagccaccgtgcctggctgctggtgtacttcttaaaaccactatggcttcagattttcactttcagaagtagaaaagaaataagcatattcatcttaaaaaaaaaaacctcagtctacccacaaaaagactgctgtaggttaagcacctaatcattcttttttagctgagtaccaaaaggtcattttttatatttggtagagaaacagtgactgaagtgggaaatttcccacttttctgttacacggaaggttaggttacatgccaacagaagaggagcatttcatcttggatgtgaacatgtgccttgtctctactcttctagtgccagttgctgcctgctactgtttctcagttttatcttttttgtctatgctaccttctcctttcttttttttttttttttgagacggagtctcgctctgtcgcccaggtcggactgcggactgcagtggcgcaatctcggctcactgcaagctccgcttcccgggttcacgccattctcctgcctcagcctcccgagtagctgggactacaggcgcccgccaccgcgcccggctaattttttgtattcttagtagagacggggtttcaccttgttagccaggatggtctcgatctcctgacctcatgatccacccgcctcggcctcccaaagtgctgggattacaggcgtgagccaccgcgcccggcccaactaccttctcttttcactgtcttctgcttacccttggaaacagtattatgaacatatcaacagttgttgtaagcctctgagtgggaagcagacacgcaagtcaaggatttactgccaagaattatgactttagggaaaaacctaaccaaaggtgtctttttaagaaaggtaccaatttctagggttatactgctctgttctttgcatctagatattcaagattatctgcttaactcttgtctgtgcatttatatgtcctccctgcatctatccatagcatcaactgtagatattttgcataatctcaacccaaatatatcatatcattatctctccctgacttacctgtttaccatcccatttctttcccagtactacctaccaggcttaacatagttagtgacatctccatcttcatagttacgaagggtaaaaatctaagaatgaccttcagcttgttgctgtccttgatatgctagctaaatcattaattgccaactactctcttcccacacttttaaagttctctccttttctagaaactgctttgatttattacgtgccagccactgggttaggctttccacatccattgtctttttttaatctttgcagccactattggaagtaggttgcattaccttgttttcatatcacatttatggaataggcctgaagaagttaattgactagctatccaaacagccaggaaatgatggatcagagatttgaggctgagtgacctgaaaatccaacctctttccactaagcactcttccaccaggcatataagatccttccctatttcatatcctcccattgatatttctgggttttttactttctctttgggtatcttttcctagccatatggaaacatttctggtcctgtgaactggttatgctgttttatgcctctgagcctttaccctcacttgcttctctcaacttgattatctttctcaacccctgtcagcttggcaggttcccttcttcaagtccctgctgagaggtcatttcattgtagccctccttacctccaccactacttccagggaattgctacaaatattgttgggttaagattatcatgtattcttctgtttcaatagaatgtgatctccttgagagcagagacatgttcatctttttagttttattagtcttaactgtattttggagctaacagaggcattttctctttataagaaaatgcatatcctactttgtacccattctaaaggaaactgtaactgtagagtaatcttttttctttcttttttttgccgctttagtttccacacatacctggcttattagtgcaattatatatgttaaacatctgttgacagtttattagttctaggcactgtgccaggtgattgaggtgcagggaaatacaccttgggaaggagagtggaatgatttgattaaggcctgcacttttctataccatcagggaggaagtgtaccaatgagttgggattatgaaaaattgtaatgacatagcacccgattctcagaggacggttttgatactgttttcctagcaggtgtttgccacttacttagtatgaagtcagtaagtatttgtctaattaatgaatgaagaaccagtttacttgcctacaattagagtaataaaagtatccatttagagtgttgggatgtaatatttttttctctctgtattgacaaacatttaaacttgtaaccttccaaggtaaaattcagaaaacaacatcatggtaatctgcagaaatgctttccttgagaaggcatgatgttaatgatatgaaaaaagatcaattatatataatatatatataaaacatgattgttatatataaaaatgggattatgttttatatatataaaacatacgattatgttatatatatatttaacatatctgtgtatgataaatgcctcctgttgtgattttcaaaaacttactaaaaattcccccagtactttgtttgtgttaatgagttgtccctcaacaggggatccttgagatcactgataaaatgtttgtgaatagtagtttccctcctttatgtgtttattttattgtattatcctttccttttaatgtaactcgcccttatcccttatcctccacaccttttttgtttttgcagtatctcttgctcctcctcctccctccatcctacaggtaactcctcagttacctttaatgggatttgtggccagagtccaagaaaatagtaagtttatgtcttctttatgctgtagatcagattgtaggcataaaatgtcatttatatgtgattgactggatagtcattcatttgctgatacttcaacatttcaatattatgaacaaatcactgtctggctagtggagataaaatagagaaattttctacttttaaataactaatagtaaagacataagacaaatacatataaaataaggcacatataagaaaagaaagatcacatcctactgaggaggtatctttaatcactagatatcccatctttttctctgggttgctcagataagtggtagtctagtttcttatcactggagttttatgggtattataggtggtctgagaatcttcctccagttttgtgattccagatatcagaagggccttttatggtagggctcagaggaccaggctgccagtctgtctcccaagaagcctcataggttggcaatgaatttcccttggcctgttcaggtaactaattttgttcataccttgagtcttctagggaagcattaagggagctcaggaggctgatgacaaatcaggaggcctgtatcaacattcagtgaggaattgctgtcacagagaccagtgaacatagactgtatgatggacaaatcctcttcttatgggcagtctttgcgagggccacatcacaataataaggttacatgatttgcatgaatctgaactaggagaatgatattaaagatctcatgtcatcagaccaaagtagtccagtgtatatatctcataacaaggatggatgacttcactggtggggtagaaatatttgcaatctgtggcttaggactcctgcttatttggaaatgggcactgccagtactagaatgtaagctctataagagcaaggagttttgcctgttttgcttgctagctgtttccccagcacttggaaaagcatctgacacatagcaggcacttttggtccctgcttttttctgcttctgtagctgaccaaatgccccccttttatcagcacattcttctagatgtggttgtattttaactaataattcagtcttactggcctaagggctcagtgtctttcagctgcctttgcatctctatttgctaatttctgaaaatagtctattttacttacttttgtttattggaaggtactccatgaacacctgtaatgtttaccacaccgtgacttcataagatgttttgttgagtttaagagctattttcacatataattaggttgatttcatatgttttaaattatgctattggggccgactcttctttagcttgggtgtgacccacactggctcgaggagaaaactgcctctcagcaacattcaactattaatagttcagcatgtgccaagcacatccatagtgtgatcctctgccaggcttgtgaggtcaagtgtgggatacagggtcactgttgccaggttttaaaaaatgtctgctgcatccaaacaggataaataccaagtagaaaaggatttaattacagtacgagaattgaaggactttccaatgctggttccattctacatactccatacaaggtggaaagtctaagtaaatgtcattacagtaaaataatttttttccatcacaaatccggtttaatcacaatgattaatgatggtagtcacttgaataataccctgggagttttttctgtttttactattgtgatgagtgtacaccttagagaattctgccaatcaattgctactgcatgttctgtgagatgttgtcattcattttgaacaaaagtggttctgagcagcttctggagtaaaggccagattttgaaactgacattgaagactaatccattaatgaaacacgaatgtttgtatagcaactaagtggttattttcttagcaaaaaatgagacttgaaagttgaataggatttaaagcaggatgtcattggttttcgccagtcaccagtgaaagctgcaagctttgtagaaacagcaaaatgtttcatgaaccaaacctaagaagtattgttttaatttaatagtaaagtgcatgactatcactttaagacttaggaatgtcttaagtagatgactgcaaaacattattatagcagcactacctatattttaaaaagtcattccctaatttgaccaccctatcacagttgattgccttttggattggtctttttcatcttttcctacaatcatatacgtttctcatttacacaacgtataaaaaaattgtgtatgaggtgtgctgtgactaattttacagacgtggcaggacttaaacattagtcaaataataaacattatttgaatgtttaagtctttaaactctttaaaacattcaccttggaaaaatacatacatttcttttggtacatcttcaaagataattctttggaattatcttcaaagctttccaggtatattattttgaagatattccttggtagcaaatactcactctgcattaagtttgatgtttggaagaagtctggaataatttggaaccagttatagtgacccagttatactggggtaagaagtacagctatgaccctgttattccccttaaaatctttctgtggctcaccatggctctttggatagagtccaaactgctgtaaggcccttcctgcctcatcctcttcagcttcctgaagctggctactgaatttggacagttctttgaaagtttcttgctttcttacctttgtacttgcattgtctttttttttttttttttttggagacagtctcactctgtcacccaggctggagtacagtggtgcaatcttggctctctgccaccttcccctcctgggttcaagtgattctcatgcctcagcctcgtgagcagctgggaatacacgtgtgcaccaccatgtgcgtctaatttttgtatttttagtagagacggggtttcgccatattggccaggctgggcttgaactcctgagctcaaatgatcctcctgcctcagcctcccaaagtgctgggattacaggcgtgagcctccccgcctggccttgttttgttctttgtatctgacatgaaatatcaatgcctctgccatcctaccctcccctcttcctccccattaactcttactcttccttcaggtttcaggaagcctttcctgacccacataacaagtgtggtttatgctgtgtgcttctatagtatcttaaagcacacactacactcaattgtaaatgaagatttggtcgttcatgtcttcatgacttttgcctactgcccttttctcaatgctgagcataatatccagccatattagttaatgtttgttgaataaatactaatgaagcatgacttgaagtttttaaaatttatcccatcccataatagtgtagcttttaagataataggcattggagttcaggtgcttttccacttacttgctgtcagaatacttaatcttggaaagccagtctccacatctataaaatgaaaaacaccacctcccaatataaagatgaaatgaaataatgcattacaaaggactagctgagtaattggaacattttaagtcaaaagtagtagcttattaaactggcagttacaagaaaagtaaaaatgaccaatggcagcatctttgagtaattttgtagtgtcatttctcaaggttattgttttgaaagttcctttggatctatggttctgtgcagttgtttaaagtcagtctttttatcttacaaatggaaataggataaatttctctttctcacccaagtatatggtaaatcacatatctatatcttttgtttattaataaaaactattaggatgaaagacattctatttaatgactgaagttttaaagtttataaagtagatcagtatagaggggcacagcagatgggaagaatactgataagacagcatggtgttgatgtggctgctcccaccaggcatcagcagtctttgaaaatccatttaattcaccgggcgcggtggctcacgcctgtaatcccagcactttgggaggccgaggtgggcggatcacagggtcaagagatctagacgatcctggctaacacggtgaaaccccatctctactaaaaatacaaaaaattagctgggtgtggtggcgggcgcctgtagtcccagctacttgggagggtgaggcaggagattggcatgaacccgggaggcagagcttgcaatgagccgagatcacaccactgcactccagcctgggcgatagagcgagactccgtctcaaaaaaaaaaaaaaaaaaaaaaaaaaatccatttaattcaattcgtaggcttagattaaaaaatactaaataaattggattgctcagagagtcacatgggaactatactggtacctcataaataagaattagtgctgttcattaaacctggggagctgataaacaggtttattcatttcattctgttcagttgtgctcacgtatttaccaaccattttgaaagcttaaggtagctgagtttgaagataatctttttgatgttactatatattggtatgcaagctgtggaagcagatctccatgtgagatattttaaattactctgatagtacacttggacatttagcctgaagaaattctgaattatagtctgaattagaagaaattctataagtaaacaaacatcctcatagatgaagtaacccaagtttgttgatgatttttttcctcttgaatttggtaaaatgctattttagaaaaattcattaagaggaaagtagtgggttattaaaattttactattccctggactcatttaagtgaaaaaatattttaagaatttgtgaaatatggttttcagtgttagtatttctgataacttacccttgaatacagtgtaaagctcagctgtattgtactgatctctgggtttttttattcttattttttattgtttattttttttttgctgttgttgtttttgagatgcggtcttgccctatggcccaggctggagtggcgtgatctcgactcactgcaacctccacctccccggttccagcgattcttgtgccttggcctcctgagtagctgggattacgggcgcccacgaccatgtgcgactaatttttgtatttttagtagaggcagggtttcaccatgttgcccaggctggtcttgaacttctgacctcaggtgatccgcctgcttcggcctcccaaagtgctgggattacaggcgcgagccaccgctcctggccatactgatctctttggaaagaggatttgtgttaatataaacaggttccagaggctcagttaataattattttgtctaaactttattcagtgtccattagcattaatccaagggcaagagagggagaacgtcatacttggagctctagaacgttatagttggtgggaagacttatcttgctcattgattttttgaaggaatattacatttattttcaagtctaggtttatattccatgaacccagaagcttggataggaaatactgaactttgcataacatatagttttgttgtcagcctgatacgttcttagtttcagatacaccacctccaccgccacctgtggaagaaccagtctttgatgagtctcccccacctcctcctcctccagaagattacgaagaggaggaagctgctgtggttgagtatagtgatccttatgctgaagaggacccaccgtgggctccacgttcttacttggaaaagggtaagtttcagaaggatatctggatagatgggaagaaacctctacatagaaatgaaatttgcggtactgaagagaatcttattttctactaagtgaagttctatttatttgtatttgtgcatttttactgagtttacaaggttcatgattttgaaagttacactagtaaaattctgtgaatatttgattttaaaaaactgatggttatctatattgttcctattggacatgctttttatgaatggtttctatcagtgtttttctgttttcctttggcctcaggaagattatttttccacattattattcctacctccatgctttagaacattagtttgtgtcaccttataatcagatacttcagtttaaatgtctccacatgaaactttcttccacagaataatggtttctcagtttctttgccaagtaatattgggcatttcttttagtgaaaagcttctttgatattagctaattatgatgtagcactttgggatacaagctttcaaatccatcaagactaatcagctcagaaaaaaatgtgtgctgtctggaaggaaattttcttttaagaaaatcaaagctactaacccactgagtctcaaagctggctacacattagaatcacttggagagcttttataaagaaataataggcttccacttttggccaagagagagcaacagtaatcaggtgtaccctccctcctaaaacaggaattttaaaaccccacaaaataatggttttcagacattgaacaacaggcactggagagaaggaaattaatttttttctttatgtagctactataaataccacatgtgatcaagaaagtaaaggagaacatgaacatgagagagacgtggaatatatctttaaaaagagagagagagagaaagagaaacataatatttctggagacgaaaaacacatgctgcagaagaaagcattagcaaccttgatgccatgacaatagaaactatccaaaataaggcacagagaagaaagtggaaaaaaaggcaaaaaggaaaacagagcaacagataatgtgagacaaggtcagatagtctttatgtatgtgtaattggagtccccaggagatgtgagaggaaaaagagttgaaacaatcatagacaaaatatttccacgtttgatgaaaactatattagttgtgtattgctacctaacaagttattccaaaaatttagtggcttaaacaaaacatccattatctcccagtttctctgcgtggctcagctgggccctctggttcagggactcttcacacggctgcaatcaaggtatcagctgaggctgcagtgatctcagggcttgactgagggagactgctttcaggctcactcgtggttattggcaggatttagttccttgtgggttgttggcctgacggcctcggcttcttcattggctgttggccagaggctgcccacaattctggatcacataggcttctccgtagggcagctcacaacatggcagctaacttcattagaatgaacaagcaagaagcgccaaaaagagaatgcaagcaagacactagtccttttttcaccttaacccagcagcgatgacctgtcatttttgccattttctgttcattaaagcaagttaataggattagtcaacactgaaggggtagggattacataaaggcatgaatactatgaggcagaaatcattgggagctgttttagaagttgtctcccacaaaactataaactcacagatccaagaagttcaataaaccccaaatagaagaaaagaaaatcttgccaaggcacatcataatcaatttgctaaaaaccagtaccttagaaaatcttaaagataatcagaggaaaaatgacatattacatacagaggaacaaagataagaatgactgcatggttctcatcaaaaagctgttaagtcagagaattgagcaaaatcttcaaagtaatgaaggaaaatgtcaacccagtgttctttacttagcaaaaatatccttcctaaattaaagatcttttttttttttttttttttgagacggagtttcgctcttgttgcccaggctggagtgcaatggcgtgatctcagctcacagcaacctccacctcccgggttcacgccattcttctgcctcagcctcccgagtagctgggactaccggcgcccaccaccgcgccccgctaatttttttgtatttttagtagagacgtggtttcacggtggtcttgatctcctgacctcatgatccgcccgcctaggcctcctaaagtgctgggattacaggcgtgagccacgaggcagagtctcgctctgtcgcccaggctggagtgcagtggtgtgatcctggctcactgcaagctccgactaccgggttcacgccattctcctgcctcaacctgctgagtagctgggactacaggcgcctgccaccatgcctgggtaattttttgtattttttttttttttggtagagacggggtttcaccgtgttagccaggatggtctcgatctcctgacctcgtgatctgcccacctctgcctcccaaagtgctgggattacaggcgtgagccactgcgcccagcctgtgctttgtattttatgtggtttgccttgtttaatataagaatgctttgggctgtaatcccagcactttgggaggctgaggcgggccgaacacctgaggttgggagttggagaccagcctgaccaacatggagaaaccccgtctctactaaaagtacaaaattagctgggcatggtgatgcatgcctgtaatcccaactactcgggaggctgaggcaggagaatcacttgaactccagaggcggaggttggggagagctgagatcgccccattgcactccagcctgggcaacaagagcgaaactccatctccaagaaaaacatgctttgaaatgttagctctattgtaattcccattatatagttgaataaaaagaagcctaggaaagttaagtatgtactgtaaactattaatagttaagtgttagaattgggatttgactgggtggtataactctagaccccacactcttaaccattgtcctaaacgtgagctctggcatctggcagacctaggattgagtcttggctttacagtttatgagcattaagtcctccctggaaaacttttttactgcccgttttgtatctcttaacttttgtaaagccatctattcttttgttcttctggctcagtgatacagcttttagctagaagtataaatgatatataggaattgtcagataacatttctgtcttcacaagactgtgacagtccctttttttttttttttgagacggagtcttgctctgttgcccaggctggagtgcagtggcacggtcttggctcactgcaagctctgcctcccaggttcacgccattctcctgcctcagcctcctgagtaggtgggactacaggcacctgccagcacacccggctaattttttgtatttttagtagagacagggtttcaccatgttagccaggatggtctcaatctcctgaccttgtgatccgcccacctcggcctcccaaagtgctgggattacaggtgtgagccaccacgcccagccgacagtcccttatctggttcatcttcgtacctctaaaagtcagcatggatgctctattaatgattgttaaaaaatgaatagtgccattaattctttctggggaattcctagaaagcttctcagagaacatggcgttcttggtgccttgaatgatgaataggagtttctcaggcagagaagagagaaaggaagggccttccaagctgagggaatcacgtgagtgagagggcatggctgtttggggcagagcagtgtccagtgcatgagggtgggggtgggttgtagggagagagggtgatatgagcacgcaaagggaataaattgtaattaggtggtgggtggctaaaaatgacaatgcgaaggtgttggattaaaaaaaaaatctggtagtagagggaaattatggaggatttttaaaaaggttaatgataatatccatctacttatgtaactttttttggagatacctgataatagtgtagagtgcattggagaggaaaagtaggagttgtaaagaccattttggataaactttgaagcaagggataatggcctcaaccaaggtagtggtgctgaaaagattgtttacataaataagcagatacaaatagaaggatttttcaagtggcattgtaactgcacttttcaaagttatttgccaaaaatcaaataacgtatcttcaaaaatcatgtttgatgatgtatcatcaaggtctttcttaaattttgttgaaagcaaaggaataagagccacctgatttgcaaacggattgagttactcagtggagtaattcttttaatatgagcaccattattttgaatggtccctttggcacccagtgttttgtactttaagacagtgcaccactgtgctttttttaagtagaaggacaaaaaggatataaaaacttttatgactgcttgactgaaggtatgatctcaagcagatcaattttaggaagcagtacttaagattagaaaatctagaaagaggccaggcatggtggctcacgcctgtaatcccagcactttgggaggccaaggccggcagatgacaaggtcaagagatcaagaccatccagccaacatggtgaaaccccacctctactacaagttcaaaaattagctgggtgtggtggtgcacgcctgtagtcccagcaactcaggaggctgaggcaggagaatcacttgaacccaggaggtggagcttgcagtgagccaagatcactcgccaccgcactccagcctggcaacagagtgagactctgtctcaaaaaaaaaaaaaaaaaaaatctagaaagagagccagttgcatgtagtggctcacacctgtaatcccttaaagtgctgtaaagcactttaagaggctgaggccggcggattgcttgagacgaggagttcaagaccagcctgggcaacatggcgataccctcgtctctacaaaaaattagaaaacttagccagacatggtggtgcatgcctgtagttccagctactctggaggctgaggtgggagcatcacctgagcccaggagtttgaaggctgcagtgagctgcgattgcaccactgcctggggacagtaagactctgtctcaataaaaagaaaaaaaatatcgagagtccctataaactgtctgccacccacactgcttagaaaatctcaggtaccctgagtgataaatgtaatcaattttaaagatgggtgcactaactggggcggtgactatgatgatggagagaagtcgagtgttggtatttgggagatttagaaggtggaattaacaggacttggggatgtcggggaaggtgagtgaggggaaggcaaagatgactcctagtttcctggctccacagaagcgtagtaatcagataactgggagaagacactgtcatggaagccatggaggaaaatgtcaagaagcaggcagaggtaatcatcattgccaaacactacaggaacattagacaaagaactgagaagaggctcaaaagtagaaggccagtttttttcaagtgaatagtttcattggagtggtaggggcagaaggaatatggctgtattagttaagcagcattattttcattgaaacagcatctccagtgggttctaaaacatttcttagaatacattaagtggtttaaccaactcttcattgatagtgtccaggttaactttgctctacctcaggacaggttataacataaattccaaagtatgttaaatgttttgctggcttaggatgaacttttttccatataaataaaatgatgtcaactcacaatatgtaatttaatacaaacagtatattgaaatggataatcttactagcattttgatttttccagtggcttgctagtttagggtacttaattgttaggtgtggttgctaataccctacaatatttggtggtcagtctttttagttcagatcagtcacttctatgtaacatgctccttttgggcctttttgttttacattgttattttagtatcaccttaatttttcccccaatatgtatttaagttacctttattactcactgtgtaactgaataatatagaatatagatgtatttagaagtatccaaaaagctaggccttgtgttaggcgctagggatacacagagatgagtgatgggcccttacctccaggagtttatagtgtagagagttttatgtttagattgctcctctttgtttcaatttactattttaggagagaaaaaatcatctgggtccttttttttctgagacggagtctcgctctgtcgctcaggctagagtgcagtggtgcaatctcggctcactgcaacctccgcctcccaggttcacgccattctcctgcctcagccccacgagtagctgggactacaggcgccggccaccatgcctgctaaattttgcatttttagtagaggcggggtttcaccatattggccaggctggtctcaaacctgaccttgtgatctgcccaccttggccttccaaagtgctgggattacaggcgtgagccaccgcgcccagcccaatctgggtccttttctgctggcatggtaccattattctttgcttatctttaactctgcagcatacttcatataaaattataggattaaaattaaaaagagaatcatttaagctaagaagtttttttcagttttacagaccttcataaaatattctagaatgtattcaattgaaatgctaaatatgaacaatgtactttgaaatttagaatgtatttttactttagcagaaacatttagaagaacaatgtgtaagtccttttctgtttcagtcataactgcacaaaaaccagatgtctagcattttaagttttttcttacatgtgctttatcagttccccatatgattttgatactatgcgtgatatacatgcataattggaaaaagtgactttcttccctattgccaaaaccagttttccagactaaataaaatctagacagattttacatttctcaacatcggtattttgaatattggtgaaaacacagatactttattacaccgctttagagttactttgataaaagtttgttgcactaaatcaagagtattttgctttttgatgaatggctttacagtaaagaattagatgaagtaaactgctggtgtatatctttccctggagtgaagtaaactactggtgtatatctttccctggagtgaaaatgaatattcatttaaaaattacttatcagggtctcgttctgtcacctgggctggagtgcagtggtacgttcagtgcttactgcagcctcaactttctgggctcaagcgatcctcctgcttcagcctcccaagtagctgggaccacagacgtgcaccaccatgcctggctaatttattatttttatttttttagagacagggttttgctatgtttcccagaccagtcttgaactcatggcctcaagtgattctcctgcctcggcctcccaaagttctgggattataggtgtgagccacagtgctcagccagaaagtgaatattctatacagcatatttctgatttttgaaaaagttaattttaaaatagtgaatactaattttggcaaaagaaaaagctgaacagttgttaaaactctcagctctctaccattataaacagtctctggaatcatgttaagtgtaaattctatctaatctagtttctacttttgatttgttttgagacagtctcactctgttacccaggctagagtgcagtgggaaaatcacggcttatttcagcctcaactttgctgagctcaggtgattctcccaagtagctgggaccacaggcacgcgctaccatgccaggctaatttttttttttttttttgtattttttttttggtagagatggggttttgccatgttgcttaggctggcaatttctacattttaaagaagaaaatgaatgtagatagagcttactaactttccacttctaagcatctctgttacaacaggcttcatattctcttctgaattacttttcatgggtttgcatttctttttcttttatttttcttttttgagacaagagtctcactctgtcaccaaggctggagggaagtgttgcgatctcagctcactcaagtgattctcttgcctcagcctcccaagtagctgggattacaggcgcccaccaccacgcttggctaatttttgtatttttagtagagacggggtttcaccatgttggccaggctggtctagaacttctgatgtcagcagtctgcctgccttggcctcccaaagtgttgggattacaggcgtaagctaccgcacctggctggatttgcatttctttaagcatcaggaatgttgtctttccttaaaaaaacactagaaaatattaggttgactagaaatgctaaatattctaaattgtattttctgggtttttttgtattttcttatatttaaacttgtatgccatttaactacatttgattgtgttcaggcatttggttatatattgagaaatgcacactgatctcttcctagcaaggatcttctaaagtattttctgaccaggtgcaggtggctcatgcctgtaatcccagcactttgggaggccgaggcaagtggatcacctgaggtcaggagttcaagaccagcttggccaacatggcaaaaccccgtctctactaaaaatacaaaaattagctgtgcgtggtggtgggcgcctgtaatcccagcacttgggaggctgaggcaagagaatcgcttgaacctgggacatggaggttgcagtgaaccgagatagtgccactgcactccagcctgggcgataagagtgagactgtctcaaaaaaaaaaaaaaaaaattctggtgttcctacaatatcactataatggaaaatattcacaatttaaggaagctatttaatttttattaaaacaggccagaaacaaattttctttagggcacattatatcagaagtccctgttgtagtttgtttctcattgatttatgtgaggcacaaggttgcatgagaaactaacaaagacagtgtgtttgtcttggaacaatggataggtggagatttcattgagtggtataaaataggtacagaagatgaagaggttggagcaaaggataattcttcaagtggaattgaggatgttacagggcatcccagtataactaaactgttgaaattgatataatacttgggaaccagagattatctggttgaaataagataacagttgaaataaccactgagataatgactcaaagagccaagttaccaagtgatttaagcaatgaaaatcacaggagggcttataggtatctgattttcttgtcacttttagtctgttattatagttatattaaattggtgacatagtgcagcatatgttttgaaaaaatatatgtagcggactcccatcattcatacatttaacttggggaaattgaaccaccattctacttagcgaagaggcataggctccagagagagtgagaaaggagacagaaatctgctgttccattagtctggtttctcacttgactctcatagtgtatctcattgccctagtataattctaaggtaaagaaaagctttaaaaaaaaaaaaaaaaaaaccacaatatggtatctcaacacaaactcaaatgaagaaacagccatctttcttgattctaggattgtgtacctcttcaatgaggtacttccctgtaggctcttaaaaggtcatcaaaagcacatttgattaaatgtgctttttccccatttgtactcaatttagagcctaacatccctagaaaatggaatttcattgtatatgactgggtattacttagaaaaaaaaacatgtaagttttggttggtgtttagaaagtcaccatgtttgagtgctacaggatttgggaacagatagctattcactggcttggttctgtctttctaggaatattactgtctttcacatcctgttttgttttcttccctcctagttgtggcaatttatgactatacaaaagacaaggaagatgagctgtcctttcaggaaggagccattatttatgtcatcaagaagaatgacgatggttggtatgagggagttatgaatggagtgactgggctttttcctgggaattacgttgagtctatcatgcattattctgagtaaagctcagcagggctgtgcttgcctcacaggaatagtcaggtcttcccagattatctgaaggccctggggattccactccagtaaagtagaatgaaggatacaaatgataaaaattacacttttttttttggtttattccccagtattaaaaacaaagcaagctgagtctgaacaaatggatctttctgccatcatttgtacaatgctgagctgtctggattgaaataaaatgaccatttttatgtatgtcaaaggtataacagcataactgtgtagccaaaacaaaatcagattaagactgattcagaaaaatctgggatctttctcaggaatactgtatacccttgggatttctcctcctgcagaatctgtggcattggatgttcttcattgcctgtgctaaggggttaacctcatggcccagtgggtaccctagccccttcttttcttccacttgtatgaagaggagggaaccaacatttaaataccacacttaaccatttttacaattatttcagatggcttttttcctctgtgacactgtaaattctgcattctctcagcacttgagtgcaccaaacgagtgaatgctgaactcacttgcatcccttcatgtttctgtttgtggattataaggatgatgaaatgtgaaagtctcccaacactctgagggtggtgaacgattgccacccgtttgattttaatgtgctgctgcatgagactgcattgttgctaatggccagtgtacccagatgtgaagtgtggtaggctggttcatatgtggaggtgggtgtgtgaagctagacacgaaggtccctaaggttctgaagagacttgaactgtggaaatgctcttagcaggcatcccgaacccctgcttcggtgctgttttgaggagtaggatcttggagttcagaccaactatgactatcatttccttcactatctagaaaaacgctattctactttggaagagaatagtagttattttcaagtctcctgacagtcactgggagtacaaggtttgctaatgtgctctctggacgttattaatggccagtattagttgctgctgtattactgactcgcttagctgtagaaagggtaatactctcctgattttgtatgattggactcttaagtagctgctgttagtcagaattaaaacccatctcagactaagaatataatgaataagattaataggccaaaatatgtatctaatcacattgataaaaattaatataactgacacaataaaacacatttcccccatctgtacaataaatacagcttcaaattcagtggagtctgtagggcagataactttaatcatcactactgtagtcagtataagaaatgctgaaaaaaatccaggagggcttgtctctttgtgggtggtcactgtgatgttgggccagctcctgttcaggtccagagctgctaacgtgggttctactcagtcccagtgacttggccagaatagagctttgccaggtaactgccctgtgctaggtgaaaggggaaaagcagtagctggatatatttcaaatgaggttttgaacaagttcagaaagtggaacttgattgaaaagtgaacaagtgtagtagtgtgtgagaaaattcagatggtgtcggatgcagaagttaatattccacttaatgttatctgagcattaaaaatcatcagcatttaactgagaccccactatagagtttccttatcaagactttttggttttaaagttgtttttaatgcattgcaagttacaatagctattttgcttttagatttttcccagcactttgtatttattagctttcattaacttgcctccagtatacattccacttcgtgcttttcttaggtcatttctacatcccttattccttgttttcctgcagtgtaatggccctgaatgtcctctgagccttcagctccattatggacccaaactagactatacttggataagttaagctcttcttcgtgtactggtctataattagaaaaactgttttaaattagatgttcccattatttatttaaacagctttttgctgagaaagcttagtggattaatgaggcagagggtgttttgaaatccaataaatagttcccacaggctgggtgtggtggcttatgcctgtaatcccagcactttcggaggccgaggtgggtggatcatgaggtcaataaattgagaccatcctggccaacatggtgaaaccccatctctactaaaaacacaaaaattagctgggcgtggtggcgcacacctgtagtcccagctacttgggaggctgaggcaggagaatcactggaacctgggaggcagaggttgcagtgagccgagattgtgccactgcactccagcctggtgacagagcgagactccatcaaaaaaaaaaaaaaaaagttcccacagctcaccactacagaagcagggaagacaactatgcagaaaacagagttagtggcggtcagcaggaatgcagctggtcttttggacccctacgggatgggggcagtgcagaagacactggtgaagtcctttatactgaagacctgtggttgggagcaggggtagtccatgggtctgctgattttttttccctatttagtactaatgtgtgtgtgatctttgttttacaaacagtaccttttgggttttctgcatattttataatttttgtacagttttgaattctatagattgtcttggaaggatactgtgtgatgggtcaggcacacagtaattggagacttttaatgtatgtaatatttcatagattgcatgctattaatcatctgtgagggtagtattttttgttttattgtaagtttccctctttttttataaattaaaagatggttggtattaggaatttcaaatgaatgcagaaaatcttacatgctgtgtactattaatattataacagacgatccaagtccaaaatctgaccaataaagcaaccattttatcaagatagagggattctaatgggagaggggattcttccctcctgaagtttgtgtgtccagtccccttaaaaaaaatgaatagttgtcttttcttgtcatattaatactcgaaagtccatggtggtattaatgaaagtacactttattgttgcctttgaacttacggccaaggcaataaatcagaaacaaaaatagtgccaatgtgtcaaaatcgacatctgagagattcagcctcccatttggaataaatatgaatcttctaagctatcttgtttaatattttccatcatttagctacttcctatctccctcagaggcgcctgctgttcccattttagagttgacagtggcctgctaattttgctatgttcctaaaagttactgggtgtgagacattttcatcccctcctttttcctactgctggtgtttattatccagctagacaatattttatgcatatttaccgtgatgtctggaccgtacctgtgctccttggcagtttatgttgaagataactaaagatttttctctttgggaggcatcaaaatgatggtagtttgcttttatctttttatgttcattttcttttagtaggtgacctttctgcattaagaactgtttttatcttttactaccttttcttttctcctttgtggagacagcatgacatgtcctgaaggtcacctttgcctttgaaaaaggtttgatggaggaattcacaggtgactgacaagtctttgaaaagaatgggatctgctcacttctggtctttttggccgggaactcctgattggtgttaaggtggtaatttcccccatataagatttagaatcactgagtttgagctagatgaaatttttaaaatttctggttgtctcattagactgatgaggtgagttttcttcttcatatgaacagctagttaataacagcagagttctcactcagtgctcagtacttaattttccactgcaccacaactgtcttaactaaatgtgctgtatttttctttaaaagttaagagttctatttggtgttttcaggaatatacgtgaaaagacatgccatgttttggtaaataccatcagagttgtgtaaaggcgtgtactaagtgcaatcttaatttgtggaaataatcttcatttacccctcctaaaactacactcagtataaacactttcccataaggtgtgtgcagtaaaaatgttatattactccaacactggcaggagcacagcacagcagccttattggagagagccttataaaagtgattaaatggaggcattgagctcattacctttaagtttactttgtgctgacctttgttcctgttttgagaatctcatataattattaaaaaaaaaaaacaattaaaacgaaacggcggggcctagctgtgtataaatgatccttgctgaatatcttaaggttttttgtaagaaaaaagaaaaaccaacaaaaaaagcttattttcacattaaaatgaaacctcttttgcaacttaagaattctatggaaaagcagtttttatcatattttgtgtccatgcaccatttttcttaaaatggcttacaaaaaagaatgtaaacaatttgtgatctggccagttgtacttttagctcccagagggagagttggtggtattatgagttgagtaaaaaccatccaggggaacttgagggagcagtctgttgccagtaatgttccttgtgtgccattaaaccacctccagatgagtggaggaacatcactttttaattttttaattgtatttggaattgttgccgtgtactaagaacttgacctaaataaaatcccacaaagtatattcaggtgtcttgttaacttatttatataaataacctctttttctaaggtggtatcttgagtttacgtgttagggataatctgacttttctgttgctctaaaccagggagctgccttttattactgaagaagtcgtctttttaaattttcaaagatttaaaatgttgagctttaaatttgatctcaagtttcttccctgaagacagctgttctaattaagaactttctaatcctgtttttgctccactcgcacctggggttttcttaccacttttctccaaatctaattctgttaatgtacagtttttttaattcaacagacaaacactgaagatgggtgttgactaaaaaatattgcagactggtcagaagtgaatctaaaagacaaaccactaactagcctgtgctttgttgctatgagagcctagattataaaagaattttctaatgatgtatctgagggtagcaagtaagtttgtcttcacaatacccaaaatgatgtttcagcttttctcacttttcaagcccatcttatttcctctgtacctttattattttggtatcattaggtaaggtgaagaataatgtaggaaacaaatacccagctaaaacatttatgggtttctcgtatttgtgaataggattttaggcgtcagagcagtcttgtcttgtctcaaagatagatagtatccaatcttttgttaataagcctattgcttgacttttttgggttactttggaattacacatttggttgaacggctttgtggatctggggcatatgccaattaaggggcacatgccatgcgttctgttttcctgtcagcctgtgtacactgctgcttctgaaggcataagtacaggtgcagtttccacaaccacgtatgattgacagatggtgaacgaaaggggaaggcttccactttttttgccctagtttggtacataataaagtgattgcaaacacattatacatttatacataccttcacatggcagtccaacacgtaattgtgactccaaagatttgaaacaaacaaaaggcattcctttttgtattactttactttgtacttagttctttgtttaaagaagaaaaatcttttttaccttttttttttttttgagacggagtctcgctctgttgcccaggctggagtgcagtggcacaatttcagctcactgcaagctccacctcctgggttcatgccattctcctgcctcagcttcccgagtagctgggactacaggcgactgccaccactcctggctaatttttttttgtatttttaatagagacggggtttcaccatgttagccgggatggtctcgatctcctgacctcgcgatccacccacctcggcctcccaaagtgctgggattacaggcgtgagccaccgcacccggctgagaagaaaagtctttctttaaaagctgttgtcacttaatcaccaatgtatttaatggccaaatttccctagttggtataaactactcttaaaagttaacaaattgaacatatcaaactagtttatttaccacacttaatttcttctgtgtatggcctatgttttgggtaccctgacatgaaatgcaaaaccagattcttaatggtgccgatccacaaacactcaaagtccccatgtttaaatgaaatctatgaattttttttattaaggatttgataagctgatataatgaaaacatgtaaatgaaaaacatttacactgactgtacgactagtgtgctaagccattacaatagtttactgacataactggcaagagtaacttggaaaataacttaatccagcagaacaaaaacatcctcagaaaaacatcctcagtagtactgaatatatctctctcatatatctatctatctatctatatatatatatatatatatatagctttgcacaatcagggagcaaggcacataatgaaatgagcatacatttatgcagaagaaaataatagcaacaaagctgcgagaaaaattgtaacttcatcttcactgagctgtgcataatcctttgaataataatgtcctctacctggtacattataatgaagttccttgtcttcttcatgctttaaaaaagtatacttctacattgtatctacctatggcaaagctcccacagcctacaagttggtgtgagccttgactcttgttttttaaagaactgagggagggagcaatcccagttaaatataatgtgcaattcccctttaacagtaaacaatgtttttaaaacacttagcacaagctaattttatcttaaatgtacatctctgtaagagttcactagtggctgatagtaaaatgaagcaaaattgtttgaaacattccagttaatgcttattttctagaaggggttattttacaagtagcaaaaaaaaaaaaaaaagtaggaggtggggaaataatatgaaaaacggcagtttttggtattaggttacaataaatttaacgaatggacagtttgcaaaatataagggtttctccccctttagtgctgcagacaagttttactgcctaagacgttgaggctgcaacaatcatgagcttggtattagtagccatccatgataaacataattaattctcaacttaaccatctataaaatatgtagtgttcaccatcaccctgactcaattcacttctctaaatgtctttggtagaaagcagccagaccccacgtgggtagtgatgtctcttgtgagacacttttcatttctgccaaaactagaaataccaccttcctttactttcattagcacctcaaagtttgcttgctggatttctttaaaaatattctgccaaaagagttgaaggcactgggggtttacagcaagtattttctctttaaaacggtttattacttcaacaagcaaagagcaaaccaactggagaaatgtatgttttttctttttatttatcaagttttattctacagctaaatttcagatttcttttacatatagaccttgcaagggcacggtaagaactgagcacttgttttatttgagggataaaggtgtagaaattttctctttgaattttataaggaaaggctgggtacagtggctcatgcctgtaatctcagcattttgggaggctgaggcaggaagatcacttgtggccaggagtttgagaccagcctgggcaacacagtgagacccccatctctaccaaaaaaaaaaaaaaaccttaaaagataataagtatctaattcttttatacttgcatttctctttggatcaaatctcaactttgtgagaggtcatacatttctacagggttaggagtaccctgcataatttatacaaatgtaaagtgtatattaaaaaaaaaaaagtgaaagttacctgcaatctaaagggttttcttcccctagaaacagtcaccctctcgtcaagtgtatgacccaattatacctattttatgaaaagcaaggcatcacattgataaccatacaggatcctatgggtttaactggtctaaacttgagtggattaaatcagttgtaattagttagctctgtaggtatatgaaaaacttttggtaatgtacaaaaataggaatgggttttttacctgtttaaagtcactttgtgtttataacaaaattacttttagctgaggaacaaaggtgacaaagatttctgttggtggctgagagtcaaagcaggccaatccacaccattacctgaaatatttttcaggctaatttataactttatggatttcctcgatacaagtttattagtttattctccatatacaagtttattctcccagaatagcagcaaataaaacttgaattggatgtacagctcctaataaccttgatgtcagagttgtcacttggttggaattattatgatcccccaatttaaattttcttgataaactcagcgttgtttgttttcagtgacaagaaaacatacatggaaaggggacccaagacagttcaccaagatagttcacagccctttgcaggatatgcctttggtgggtgggagcacctagattttagaggactataaaacgccatgtttactttgtttgaaattttctgatgaaaagtcttttgtaacttaacattccacattttcatttaaaaagtcccagaaatataaactatccaatttacaactaaggtgggtatctgtaaaaaccttaagaatagttactcttcccaagagaattacagcgtctaagggggggaaagaaagcatctgagcagtaaaagtcaagctggtaaaatccaatacagaatatctaataaaccataagttattttactgagaatagattctgctgccctacagcattggtgccaaaactctaagcatagagtgattctactttgaaattatccatagtagaaattaggagtgtcactaattaagcaagtcactacctctaataagcacctgtttgcactgccctcagcagcaggatgagttaatccatgctgttcacttttcagtacagccaagtcaactgcacagacttgaagcagccaagctgggtgagagctgcagagcagagggcagtgaaagaaggcacagtactagtgtcgtgcggcagtagatgctttccatgaatacaccagagaaaaagagctacagaaatacagtctaggaaaagctacatcccaacaaaaatccaaattaaagaaaacccactagggagtaaaacagaagtataaagtatcactttagtggttttttaaattcagttcatacatgaggttaaaacatttttaatagccatttctgtctgtggaggaatgtaaagggaaatggcctgttgtcggacaagccactggactggggttaaaatgagtctcctcctctagccttactctcttcctggcatcattagtgttcaaaaggatgtctgctattccaggaaaacagaccagaagcatctgttcaggatggctatcatcaggattgatacaagcaagaaattccaagaaatcctgcactgaaaacataaaggctgttgttttagggctcaaatcatgggtgaaaaaaggttagcgggtacattttttccccctcaagaaaaactgaagtgttgtctaccttctcatgagaaaatcaccaccacaataaaactcaaaacctcagggatgaatactttgataactggattcatattcttactaactctaacccacaaatatgggtgcccctcaaactataaaactgcaggcagaagactatgagaaattcattcatgaatcacagtagcgcttggcaatctactcaaacattacccaaatttctgtgcatgcttaaattaacaatgcagatgtgttaaagatcacttcataaatatcaaacacaaaacttggtgaacaatttgaaagacctaaaaattaatggtatatattcttattgctccataaccacatgaacataaccgaacaatattctggagatgtagcaatggagaggtgctgttcactctctgtttacgatgcggttttcgtggagtgtgggttatgcaagaccttgagtatactgtactaattaagcacttttgctcattctagaattatttaccatctcttcccccactttactggcatcactttttccttgtgggacaatgtcaactgatttctgcagtttgcattggtaatcattaacaataggcacagactttcattacaagatgtgctccccttataagtgctgggatggcccatttttattctcttgtttaggagctgctctgagattgttttattcctaatagtccaatttatcataagttgatgagagtacttatttctctcatgtaccaaggaaaattcacagaaaaaagcatatagaagtatagtgtgtcgttagagcactgactccacgttataccaaactgcacacgcataaaacgtaatgtcagttactggacttggactgtcccactccatcagaacacctagtaacctgaactaatcacaaccaggctgcagtcagcaagggtcctggtagccccagtagctataaatgaaactgtcttccctctccatgtagtcccatacttaatgagctttttgtattacatattataacccatatacaaccagattaatgacacctgtacaggggccagttctgttctctcatcacccttcccttctatagagcaatgctcaaaaaatgcattttagaaaatgattttgtttttcataatgcaccatattggggcacaggatgtgtatatttcatataccaattgtctacagatatgtaataacacctacctaaagcacatattttaagaaggtaactggtgacccaaagacatactgggacagaacattacagagataactgtgttatccatcctcttaaaatcaatcaaagtgaggatcatgaagccaagttgataaagcttcataaaacagtactaaaaaggaactatccagaattatagcactaattatccatgtattgtaggcaaagagcttatctgtcagcacatcctaaatgtgggtggatcactgcagcagtactgcagctagaacagctgagttaattacgccatgtatttactttctatgcacaaccacatacagatgatgtctgtgaacatttccccatcctgcactagttacccgttctatgaagctgagagattttcctgatttaaagtgccccttcatgtatagcaatgaagtgtcagtcaagcaattctaacttcagccaactggggaaaaacaaacacaaaagccttatagatacaccaaacattctggtgatttttctcaaccagaaatagcacattctacatctattccttagttatataatacacaacatgcacgaataggctacacatggacagacacttataaataccttctaaataagtgattagaagtttttggtccaatccacatgatatagaaatcttaagagacaacacacatccccttctatgcctcttccacccaaaatacagaacacccattttcagattaggagagaaaaggaataaatagaataactctcagctctctctctatatacacatacacatacatatatgtatacatatatacacacactgtacagctgtgtgtacatgcacgtgtacacacacacatacacatatagctggacactacctgaataacatcataccaggaggctctgaacacctgaattcacagatgatcaggtgagctgattgtagcagtgattacagatatcatgaaaataaagtcctatggtggctaccagtctctggagagcttggtgttctggtctcttttggggggagcaggagggggtcctctccgcaacgttgcatagcctgatatatgactgcctccgtaaccagccttctgttgatcagacagcagttcagggggtggtggaggcaatgccatatcatccatggtggctgttggttctgctctggacatgcgggaggagagtgagccgtgccgagtgatggactttcgttgcagtgtcctgttgaggtcagccaggaatccaggctggacactaaggctggatttgggagaggtgggcacttgtggcacaactgtggccattgttggctgctcagaaatctcagcttgagtgaggcgggtgctatcattccgtttgggtcgtgtgggtggaggggccttcttcactgacattttagaccattgttgtggttgaggattaacgactgccacttttggagaggtgtttcccgagaaaactgctggaatctcaatggggggcagaggaagctctgtttcaggtggagggggtggaaaatcagaatcggatggaggagaaggaaattccaccacggagtcctttccacgcccactcagaacaggggcttttgctgacacacacccttgttggagaactccaggaaggttgactccagaaagattgagttttccaggcttggggggtgctgcaggaggtggtagggtctccttgctgggagaccctgattctgctggcggtgtaaacttgctgactagactgtccaccgagggtctcttgggctcggggtgctctgcaccactgctggatttaatgctggagttgcgctgtggggttgggggtggtttctttcccccagggctggacgtcttactggtctttttgcctggagatccacttttgtcaggggtaggagaagctgtgggtggaggtggtggtggtggggctgggacaggtgatgggggtggaggaggaaacaccaggctgctttcaggagggggaggagggaagtccggagaagggactgggatggagctgggctgccacttgggctttgcttttactgcaggaggggactgtggagctacatttgctgggacaggctttaagggctgagattccatggcagggggagttggagggggtggaaactggctggctatctgcttcacgaccgagggcaccggtgacagtggagagggagggggttttgcacagaagctctgttgcttgggtaatgttggcgggggtactggaacaggaggggtagggggagagggtggaatgtaagaagcagggaaagctggctgcttttttgctgggggcactggaggagtaggtgtgggtggtgcagcttgagtcacaacaggtgccacagtcttggtgctggttggtgcggggatggtcacaaggggttttgggggagcttggggagggaggggtgcagggataggaggaggtggggggggtgttgggggagccacctgagtaatatgctgaacttgatggatcttcagtggaggaggcggggcactgaactgtggaagggatggggcacacggtgcaggctttagctgggccatggcagagcctggggttgggggtggaggagggggagggggtggtggaacaactccattggggggtaccaggatctgaggcttcactgactgtgactgcatcactgggggtgttggcggcttaaacagggcccctgaatgctgagacgcattctgtagccgtgttattgtgctgtacttgacgaacattggggctgctgagcctgcagaaggtgcagactggctggggagtgggggaggagggggtggtggagggggtggtggaggaggaggtgggggtggcggaggaggtagaggtggtgaaggctgtgaagcagtgtagggggtgactatcttaggttgcggggataaagggggcacaagtgaagtgtagggccgattcatagactccattctggcctaaaaggagtataaaaagggagtgggagagagaaaaacacaacaaacaaaacagttacagaggtaagctttgattgtgtaaaactaaaaagcagggagtctgggacatgcatgaaaaggatgcagaagttggtggtgatcataaagatggacaatgtcaggaaggctaaaatctgattgtgcgggcaagaaggaaacagaaaacttgttttaccccacagtaaaatagctagaccatctaacaatctaggaaaaatgtccggctgcaaaagctgtttgaatggtgacaggatgcatgacttctgaccttggctgtatgactttgacacagcctgccctacatggaaccctctgtggcggtcctctgagcactggacttccaaggggagatgtgatggctccagtttacctttcagtccatgactgcatccacatcaagcagatgctataactgggtttaggagggcttcctggtggaatgaggatggctttttgatgctagtaagctgacacaggagagtatgagaatgttgagcaggcgtgcacagtcacacaggaatgaataagcttgacacacacactcgtgttggtgtgagacaattgcatccaacatgcacagaagtccagcaatgcaggtaaaggggggacattctttacatttgttttactggaaaatacataaagaaatgctttgtaaacattatagcaaaagactgtaaaaatatcatacagaaaaagccagaagaaattaagaggaagctctggaaggctagaataaagaaaatgtatcaagaaatggcagctagcatttgccaacaaccaacccatctgggtagctgaaatgatcacatctggtagtttatttcgtggagctaatcatgcacgatggtggttcaggtactttgaaaagaggaaaggaaggacccttgttttaaaaactttaggtacatcttttaggctctttgaacaaactttgaggatccaagataaaccatttgttttcaattttgaatgacatcgagaatgcatgggttagtgaactagaaggctcattatagggctgaattctaatagccatccggacattcacatgtttcttttaaaattacacaaaaagattagtctgtgagattgggatacaggcgtcaccgaggttaatgtgtttccagagaacaacccctgaccttaacttgaccctgtcttggctgcttcaggggcgcaggccttagctgtgctggccttctcatttggcacctgagactgaggtaacaggagaagaaatacagagtgatcaagccttaaagcattactgctgacagcagggttcctactcttctgaaactctgtgcaataacggactttgctgcttaatcacagaacattttgggtctgtgattttgttttccttggccttacacataactaggttctataacttaaaatgcacacggatctcaccattagtaatttggtaaggcaaaggggtttttctttagccatccgaattctgtaaaccaacttctttagtacatttttaaaatactagctccatccaaattgattaaatgggggaagggagagagaaattatttcttaaaagtttgagtctctaataagggagttaaactcagtgttttgagaatttagatcgttagaaccaattctcaaatgctcatttctgaaggaaagggcttcagccccacatggtgctactaaggccttctcttccctgcgggagcccagttagtgaaccacatatacgaatgaaggaataaaaggaaaaatgtccatttattctcattcgtgaatgtacctgtataagtgattcagaccaaaagcaccccccaccaaaaaattaaataaataaataaaaacaattattagtaaaaataaaatagttgagcccagggtgccactggttcctcaatgatggagtgacctcttgcatattgaaatggtgactacagccaggacacatccttgcctacacaactacagatgatgtctgatagaaggccatgatgtctttcaaatgaactgaagaacctctctattttcctaattatagtcttgcaataactatactcatccttcagtctcactgcacaatatactatgcaaggctcaggaatccaaaacttttaagggaaatgattttaatttagtcttccacataaagtataatttgaaaaaattcatcaatgcccaaagaaatggcaaaagcattaaaaaaaaaaaaggtaaggaatgagtctgaataaattaaccaataaagaaataactggactgaatatggtggctcatgcctgtaatcccaggactttggaaagccgaggcaggaggatcgcttgaggccaggagttcgagaccagcccaggcaaaatagccagaccttgtctctaccaaaaaataaaaaactagccaggcatggtggtgtgcacctgtagtcccaactactcaggcaactactcgggaggctgaggtgagcaagcaggctgaggtgggaggatcatttgagcccaggaggcttaagtgagccctgataacaccactgcattccagcctgggtgacgggaaagggagagggagagggagaggaggggatggggagaaggaaggaaaggaagggaaggaagggagagaaggaaggggagggagggagggaagtgaggggagggaggaaaggagggaaggaaggaagaaaagaataaaaaagaagagaaaaaaagagagagagaggctgggcacggtggctctcgcctgtaatcccagcactctgggaggctgaggcaggtggatctcgaagtcaagaggttgaaaccatcctagacaacagggtgaaaccctgtctctactaaaaatacaaaaattagctgggcgtggtagcatgtgcctataatcccagctactcgggaggctgaggcaggagaatcgtttgaacccgggaggcgaaggctgcagtgagctgagatcacgccactgcactccagcctggcgacagactgacactctgtcaaaaaaaaaaaaaaaaaaaaaggaagaagaaaaaaagacaggaaagaagagagagaactgtaaacagcttctctagaatttagggcatttgcaatagatggtgttttgccatccaaactgcttaaaggtggaaaggaagaaattgttatttcttaaaaatctgagccactgatgaaagaattaaactgccagttttttttgtttttttgagattttaagtcattagagccaatttgtaaaatactcatttccaaggggaagtcaaatcaacaggtctctctgaactgtctttacccactacaattaggaagattgaaaattaataaaggagactgaaataaggccaaataagatccccgataaagacataagagagcaacaatttaaacccaaaagaataccacagaattttcaatgtaaattaaaacgaagctgttaccttgctggactcttccaactgagtgcctcgtttccaggcttcagagaatacggagctcacaatgctctgggaacggacgtgtcctgctggctgggtgtcagaaactccgctatcagactgattggagtggtttgactgagactctgtttaaaatagttttttaaacataggtttaaaagagtcagtattctgacaatattcatatgtatgtctagttagatcttttacacaaggtcaagtgctgtgtacaacagcaccaagttattttactcatttcatcataaacacagccagtattttctactagaaaacttcccttaccttggaattaagaaatctcagattagtgttaaatatttcaccatgagagactgataattataataaatgattcacataacattattggtatcctgacacccagtcttgcatgaaatcaactctaaacaataaaagaattaatgaaccatcagtagaggagtctctcaatcatgtctgcattacattgagaatcagcctttttaatacccctgccttaaggtcacgccagaattgtaacttaggaattcggatctatacacaatgattatttccttttttctagcaatgagcaatacttagaatttgaccctctagtgcgaagtgtgtttcctagggatttaggtattggacccatagggtggcagctgtgctgtatcctggcctgtcagcaaggcacaaaaaagttttgaaaggagtggggcctggtgggaatggctgtgagcatacagtgtctctttgccgcctgagcaaggaggctgaggtgggaggatcatttgagcccaggagagttaagtgagctatgataacaccactgcattccagcctgggtgatgggagaggaaggaaggaaaaggaaggggaaccatgttctggaagggttgttggttggttttttttccccattttaataaatattttcttagaatagttttaagatatctacatattagatatttgaatattagaacagttttagcacagaattcctacatacccggcatccagtttacccatttagcaatatgtttggttttaaagaaattctcctttggggaaaaagtgtcctcttttaattttattcccttttccccattattaacatgttacattactatactacatttgtcacaactaaggaaatgtcctgctactattaactacgctccacactttatttggatttcactagtttttccctcatgtgccttttctgatccaggacaccacgtcacagttagtcatcatgtctcctataacggcttctcagaatttcctgtttttgatgacttagacagttttgaggaatagtggtcaggtatcttgtagactgtctctcagttttggtttgtctgatgctttttctcttgattagtctgtttatggaacttggggaggaagatcatagaggaaaaaagccattctcacacactatgtcaaaggtccctataaccaatgtgacttagatactgaccttgaccacatggttgtggcagtgtttgtcaggtttctccactgtgaagttacccctaatccccgttccataatcactggaagcaagtcactaagcacagtccacacttgaggacttaggtaagctctacttccttcaggacaaagtgtcttcataaatcatttagaaatctacacaggacagttctctcctcttccccatttatttattcaatgatttatttacatcagtataaactcatggatatttatgtccatgggttacaatcctatactatattacttattgtattgctcaaattgttccagctttgacctttggagctctttcagactggctcctctgtgtatccctttgacatattctcatcttgtgttttgtgagacagggtctcgttctgttgcacaagctggagcacagtggtgtgattatagctcactgcagccttgaacttttgggctcaagcaatcctcctgcctcagcctcctgagttgctaggactatgtgtactactaagtctggctaatttaaaaaaaaaaaaaaaaaaaagttgtggagatggggtcttgctgtgctgcccaggctggttttgaactactgggctcacgtgatcccttaacctaggcctcccaaagcattggcattacaggcgtcagccactgtgcctggccctactgtcgttttttaagcattcccttactttctggcattacaagatgctctaggctcatcttgtatatattctctgctgcagccctataatttgccatttctttgagagccttggttttcttttctttcttttttttttttttttttgaagaatggtattagaaaccatgatctatttaagcagcatccttggccaaaatttaataaaacgaaaaaacaaaaagaaacctctatgatctagggactgggtattctcattgttcctggggtatcactgcttctagtcctcagtggacagcactaggaaatgtatgtgtatatacacattctaaatttgtttttacttaatagagatgaaatagagtcatgcagcttttaaatatactactaaagttattatttctttcatcacatccaatgcaaaaatttaaaaattctgcttttagatgacatggatctcattcatgaaacattttgaattgaaagaagatttatgttaagatgtaatcatagcatgcacttgtttaaaggatataggaatctgaaggagtgcagcttcttcatggtttctgagtacaaagattctttccaagtaatgttttatcccaaattatgcattaacagtgtccagcagtatgtatgttttgaataaattttataaatataaataacaaaa

SEQ ID NO: 8 - DNA, 28241 bp, Homo sapiens
  source 1..28241: mol_type = other DNA
atgggctccgagaaggactccgagtcgccgcgctccacatcgctacatgcggccgcacccgaccctaagtgccgcagcggcggccggcgccggcgcctcaccttgcacagcgtcttctctgcctcggcccgcggccgccgcgcccgggccaagccgcaggccgagccgccgcccccggctgcgcagccgccgcccgccccggcccctgccgcggcccagggcccgccgcccgaggcgctgcccgccgagccggccgccgaggccgaggcggaggccgcggcggcggcggcggagcctgggttcgacgatgaggaggcggcggagggcggtggcccgggcgcggaggaggtggagtgtccgctgtgcctggtgcggctgccgcctgagcgggccccgcgcctcctcagctgtccgcaccgctcgtgccgggactgcctccgccactacctgcgcctggagataagcgagagcagggtgcccatcagctgccccgagtgcagcgagcgactcaacccgcacgacatccgcttgctgctcgccgacccgccgcttatgcacaagtacgaggagttcatgctgcgccgctacctagcctcggaccccgactgccgctggtgcccggccccggactgcgggtgagcgcgggggcgtggcgcgggtggcggcgggctgcagccgaggggcgtggctgggggcagcagggaccccgcgtgggtgtcccaagcagggaaacccgcaaggcggcagcttcggcggggtggtaaccatcaggcaagcccagactagtggtgtgaacgcacccgacaccccgccccctgccccagggctcgaggtggctgctaagcattcggtgaggggaagggagctgtccaagttaggagacagggagaggcggtttttttgttgggggaatgccctctgtccggaggtgaggacagtatctttttttttttttctttttttttttggagacggagtctcgccctgccgcccaggctggagtgcaatggcgcgatctcggctcactgcaacctccgcctctcaggttcaagcgattctcctgcctcagcctcccgagtagctgggattacaggcgcccgccaccacacccggctaatttctttgtatttttagtagagatggggtttcaccatgttggctaggctggtctcgaactcctgacctcaggtgatcctcctgcctcggcctcccaaagtgctgggattacaggcgtgagccaccgctcccggccaaggtggggagtatctcttaatgagagtggggaggggatatttggccaaggagggaatgagaatattctgagggggcagcgcgtcggaggggtgtgtccacttggctagggacagacttagcattgcagaagaaggcgtgttctccctgacaaccaccgctgaaagttgggatggaggtgactggggaataggctctcgggtaccctgagcactatgtgttctgtgccacgctatcgggaggcactctgtcgttcttaccttgctgccttgggtagggtgaggggtagacagatatgttctttgtccagagtctcaatgggggcactgagaagaatgcccagaggttggtgtgataggagaaattgtgtttctgaacccctttgatcttgagttcttgatgacagtctttttaatgcaccatgtaggctgaattttaaagggcagtaaattaaaatatgcaatatctgcagagacataatacaccagattttgctatctgaagcattcagtggagaccttcctcgccctccccgcctttagaagtctaattgttactgtcagtatatcccatgaaggggttgcacgcaggaagaggggctcatttaagtagttgggagtcagacagccattacctgttctgtgaccttgggcagataattttattcttgtgtgtcatgttttggcgacaaaaagatgctggggagtccttgcagtgtgtaaacgtaatgctagtaaaaagttgtgtgatctttagcttcaaaggagttaaggacttttaattgtagcctatatatcaaggtggttttgaaatctccatgatgctgctggttgtctcctttcaaaaggagctgtcttagagtgtctaggagagtaagaagagttaacttctgtttttaattctgccaaacttgtttagaaatgggtgtgctatttaacctcactgagatggggtttctaaattactttgaagtgttgtggtcaaaggaatggtgtttatggtggctcactttcactttcagttaataagtatcaggaaggaccttttaggttcatggaactgtctatgtctagtgatcttactggccctctgaggttaatttatattaaagttttacagatactgttgatctgttttcttaaccaaacgaatattaagagaacacaggccaggctcggtggctcacgcctatagtcctagcattctgggagaccaaggtgggtggatcacctgaggtcgggagctcaagaccagcctggccaacatagtggtatcctgtctctgctaaaaatagaaaaattagccgggcatggtggtgcacacctgtagtcccagctacccaggaggctgaggcagaatcgcttgaacctgtgaggcagaggtgcagtgagccgagatcaggccactatactccagcctgggtgacagagcgagattctgtctcaagaaaaaaaaaaaacaaaacactgcatagttaattttggaatagtacattaactcctttctgagatgtttccttgagttctaagaaatgtggcagatcatctttctggaaaaggtccctgtttgtttttttatttttctaaagtcagtttctgtctttgctcacatcaataaaaatgcacagaaaataattttcaagcttggtgacaactctcaactatttggaagttattaaaaaattaggccatttcttattttagccaagtattatgttagtatcctccagattttatttttttaattagttagaagaatgataatcatatatatagttatatatataaacaatgtatttttttatatgtgtcatctacggacttaaggtggagtttggggaaagaagaaagctggcctctcaatacctgtgtgccaggtatatataatttaattcgatacaaccttgtgagataggtttaggtttgatatagttttataaatgaggaaactaaagtttaaggaaattgaatgacttgttcagggtcatataactagtaagtggtggaaccaggcttagaacaggggtcttaattccaaccaatgccaatattccttccattcagcccctgttttaaaaagcatttgcttgtcaacatagccgcattattgaggatgctgctgcttgggtgcatttcattaagtgtagcctgaggacaacatggagaaagccaaagatactagagtctagtttcctttctgattcctgttgttaacagcctcctacctacgttatttttcttatctgaaataggtctaattctttcctgacttgagaggtttaattaatgtttacacggtgttttgagatcttcagttgaaagtggttatagggagtaactttaaaattctgttagttgccaaatagatgcctgagttctcccttgggatgtgcctagtggctttgcatctctttttttttgagacagcgtctcgctctgtcacccaagctggagtgcagcagtggtgcaatcacggctcactgcagcctcaatctcctgggctcaggcgatcctcctgcctcagcatctcaagtagctgggaacacgggtgcatgccaccaagcccagctaattattattattaatattattattattatttgtagagatagggtctccctgtgttgcccaggctggtctcgaactcctgggctcaagctgttttcccgccttggcctcccaaagtgctgggattattgctgcctctttttaatgccaggaaaaaaaatagcttctgtgttcttactggatgtcatggttcccttgttttgttttgaacagtgttgttttgttttgttttagagacagagtctcactctgtgcccaggctggagtgcagtggcatgatcatggcttactacaaccttgaactccttgactaaagcagtactcccacctcagcctcctgagtaactgggattataggcacgaaccactgcacactgctcctttgttttatttttttaaacaaatcgttctattcttctggggctggtagaggtcattgataaacactagaagagaagtccaagtcccagttacctcctattcccatacctgaccatctttactgcccacagataaagttcttgccagccaaattgatcaggtctcccctctgccttgtttgtatgtgcatttggtagggtgaggggggcatgtgagcaatcttacaggttctgatcattagttttactataattactcataataacaagaacaccatacattcagagattcatgatttgtttacagaatatttgtaggatagagcaaagagttttggatttttcttctcttacactcaaatatggttttattttattcataaataagggaaccaatttcagtgggaaaacattcacattataatttttttttttttgagacggagtctcgctctgtcacccaggctggagtgcagtggcaccatctctgctcagtgcaagctctgcctgccgggttcacgccattctcctgcctcagcctcctgagtagctgggaccacaggcgcccaccaccacgcctggttaattttttttttttttttttttgtatttttagtagagacggggtttcaccgtgttagctaggatggtctcgatctcctgacctcgtgatctgcccacctcggcctcccaaagtgctgggattacaggcgtgagccactgtgcccggcctcacattattatttaatatactaagaacaatatggcctagtataatcttaaaacaagctgtcaaatgagataaaattagttcaaaatacaaataactgattttttatagttctttatagtcttcagactataatctcattcagacataatttcattttagtctcatccaggtggatattggcgtgcattttataaaggagaaaccagttcagagaagtttaaacatggggcctagtgtttcattgctaataattggtacaattgatcttttacgcttttgagtctctgcccaagtatgtcttttcagaaaccccgaagtcaggtaactgtaatgttttcctctcaagtatcctgttgctaatcttaaaaccctttcagaatctctaggagactgacgggtgagcaaagtaggcaacagaaaatttcctggtgtacaggggcagatcttctgtacagatgaataagaagggataaggctgtcttgacctaaattctttgtgcaggtccaccactccagcctttcattgctgcctctgtcctctgcagaatccttcctcccacctgatcccaggaaacagtatcagctattggccttcccagacaactagactggaccatcccataaacaggaagcttttttcatccctagcacatttatgagggaagatcaagcaagctctttgagcaagacaaatttcagtcagtgaaggaggatttttgctttctgaagcctccctgaacctcttctcttgatttggctccatacctcctgttccacaacttttccctgcattccccaactccacaccaccccctcctcttgtgcacgtacaccaacctccatcccaatacatctgtctcagatttgccaaagtacttgtactaaaggagaacatctgtatcactcccctgcctaagactattcattgactacctaacctataagatgagttcttattatgtctttgagaacttatttgatctacccttatcatttaagctcctttacagtttccaaccatcttttttttttttttagatggagtctcgctctgttgcccaggcaggctggagtgcagtggtgcaatctcggctcactgcaagctccacctcccgggttcatgctattctcctgcctcagcctcctgagtagctgggactacaggcacctgcaaccatgcctggctaattttttgtatttttagcagagacggggttttaccgtgttagccaggatggtctcgatctcctgacctcgtgatccacccatctcagcctcccaaagtgctgggattacaggcgtgagccaccacgcccggccatctccaaccatcttttgattttattttctatttttcactcacatcactatttcctaaggtatgttataggcattacttgaaagaaaaatgttttgtgaggaaataagcttggaaaatactgagttaaacaaaataaaacaagtttatgagtttcttaaatctttaaacatgctaatatgctaatatgtagtataaatcttcaatataatgtaatttccccaatttagatcaccaggaaacaggtttttgttttttctgtagcatctttaaggcttaactcaaactttccctaaactcctttaatagttaccatgctggcctgcctttggttagtgtccttatttaaccataaaccttatgctctgaatagattgagagctcatgtctctagactaggatatctatattccaaccatttctacaactctgtgtacaaagtctttcaattaggctctagaagagtgtggtacatagatgaattttgatgaaaaagataagaaatatgagcagcatagttctcagaggaagaatagagatgaaagagataagcaagaatagtatagacaggtgatcattcaattcaacagacaacttttttttgagatggagtctcgctttgtcgcccaggctggagtgcagttgtgccatctcagctcactgcaacctctgcctctcgggttcaagcgattcttctgcctcagcctcccaagtatctgggattacaggcatgtgccacaatgtccagctaatgtttgtatttttagtagaaacagggtttcaccatgttggccaggctgggcttgaattcctgacttcaagcgagccacccgcctcaccctcccaaagtgctgggattacaggtgtgagccaccacacctggcttcaacagatactttcagaatgatacactgttgaaccctgggtgagtactgggtatttcaaaaagaacttagacatggttttcttgataggaagtttcacctggtagaggagacagataattgatacatagatagatagaaaattattcaaatgtcatatgataaatactaaagaaaatacgggtgctcttagatagatgaaagaacaatagaatttgcatgatggtttcaagaaagacttcacagaggagcaggcatggtggtgtgcacctgtggtcccagctgcttaggaggctgaggtgggaggattagttgagcccaggagttcgagaccagcctgggtaatagcaagaccccatacctgggaaatgactagagatcaacctgaaaacgtggactggattcaggttgataggcctgtgtaagccatggaaataagttttgggttgaagcactttttttcttttttctttttctttgaaggattttaagcaaaagagtaaccttccagaatggaatttggatggagtggggaatagggagagcagataaggaggctcttggagttgtctagcctagagatgggtcttaaatagggcaggaaaaatgaagatgttaagggtacagttcattgtgacaagttggcgcatgtctaccaccctgatgcctactaggggtctatttgtaaatgggtagcctagttatgttacatgacttggggatggaaagtacagacataatataggaacacatttctttaaccactgaagtctattggagcataatcaaatttatactaatggaaatctctttccagggctgaagctaagtaatgctgtggtctagcttgtcactttatgaagtttctgaagatttaggaaattaataaaatgagtaaaagttgtatgaacttaagcagcaggggctggggtgggcggtctgtagtctttttcttttttattattttttatttttttgagatagggtttaactctgtaactctgttgcccgtgctggagtgcagtggtgcaatttcagctcactagaacctcaacctcccaggctcaggtgatcctcccacctcagcctcctaagtagctgggactgcaggcatgtgccaccacacgccaccgcgccccaccacactcggctaatttttgttgttgttgttatttgaagagagagtctcactctgtcacccaggctggagtgcagtggtgcaatctcggctcacagcaacctctgcctcctggattcaagtgattctcctgcctcagcctcccgagtagctgggagtagctgggactacaagtgcacgccaccatgcccagctaatttttttgtatttttagtagagaggggttttgtcaggttggccaggctggtctcgaactcctgacctcaggtgatccacccacctcagcctcccaaagtgctgggattacaggcatgagccaccatgcccggcctaatttttgtgtctttcgtagagatgggatttcaccatgttgccctggctggtcttgaactcttgggttcaagtgatcctcctgcctttgcctgacaaagttctggggttatgggcatgagccactgcacccagctgtgtctgtattcttcacagcatgtaattttctacacctttcttttagcttctgattagcaagcctgactgattggttaagctaaaagagcagagtaggagagatgcaccagcatgggacgtggaagagaaggaacaaagtggacagggcagattgggtttcaaggatgaggtattttcttttcttttttttttttttttgagacagggtttagctctgtctcccaggctggagtgcagtggcacgatcttggctcactgcagcctccacctcccgggctgtagccgtcctcccacctcagcctcctgagtagctgggactacaggcatgcactacaggcatgcaccaccacgcctagctaatttttgtattttttttttttgtagagatggggttttgccatgttgcccagactggtctcgaactcctgagctcaagcaatccacccaccttggcttcccaaagtgctgggattacaggtgtgatccaccatgcccaggcgaggttttttttttccaactattcgggaagaagattaccgtattcagaacttaggggtttaccactaaagtgggtttatatgaaattttaggattaggttatagtacctggcatataataagccaatagatacatggatacattgaaaagattgctttagagcagagtgatggcctaggagaagacctagaatgtcctagggaaggtcaaacaaccaaaacaagagagggtctctgtcattcatgcaacacaggtattttgagcatgaaccagtatactagactgagattaaaaagtggatgatatgtctccttaagtccagtgtggtttggaaggcaagcatataaacagttagttacattataatgtaagtgttataaaataattgtgcacacccacgaagtaggcaacgagctgcctagagaggttaagtatattttacagagaaaatgacacctgagttggttcttaaatgggtacttgtcagggcaagaagtaaggacaagacatttctaggtagaaggaatagagtatgtaaaagccagaaagtaggacagagtgtacgatgtttttacgccatatatctttgaggacaaggtctcacatgcagttttagaacgtgtttagctacgtttgaatgtgacaagtacctatacctccatttggtggaatagaagctaaggtttggagattgtttttttttttttttgagatggaattcctcttttgttgcccaggctggagtgcagtggtgtggtcttggctcactgcaacctccgcctcccagtttcaagcaattctcctgcctcagcctcccgagtagctggattacaggcatgcgccaccatgcctggctaatttttgtatttttagttgagacgggatttcaccatgttggccaggctggtcttgaactcctgacctcaggtgatccacctgcctcggcctcccagagtgctgggattacaggcgtgagtgactgcaccaggccggtttggagattttaatagcttcatgtcatgcagcatgagtcagaggcaagagctcagaccaggtacccaaaaacaggaatgccaaatctcgtgccctgagtaattctgtgtcgtagtaatagattgctgtggattcatgagtaatttggggttattttacttccttggcaccaaattacacactcaaaattgacattgttgatcctatccaatgttcttctttttcaagaaaaaaaaaaaagtgggctgggcacggtggctcacacttgtaatcccagcactttgggaggctgaggcaggaggatcacttgaaggccaggagttcgagaccagcctggccaacatggtgaaaccccatctctactaaaaatacaaaaaatgtagctgggcatggtggcgggcgcctgtaagcccagctacttgggaggctgaggcaggagaatcgcttgaacccaggaggcagaggttgcagtaagccgagagcacgccattgcactccagcctgggcaacaagagtgaaactccgtctcaaaaaaaaaaaaaaaaaaaaaaaagaagtgggggctgggggaatgttaataaacatttacttctgccatgtgaggtaggaatggatgatgaagtgttcaaggctccctactggatgtccacttaatttgtatctttagaagttgacttagtgcttttctgaggtcatccagtaactttcccatttaatgcaaaataacaagctagtcactgtcttgaggagacacgttgtttatctttagtagttattttgcagctaggtggggtaaatttgcccagaactcctacaggatatgaatcatttgcattcatagactgacctgttctcactttgttctttctgaaaagagttttaatacagcctgtattatataacataggggatacattgtcatttatattttcagcatcattctcaagtcaatttgcagactctatgataaacctgagaacttgagttgctatgattaacatctcatgtacattcaaataaacaagcaaactgtagaataaatcccagaaaatgttattagctttttgtacacgttatttgaggtctttgaatattgcgggagagtattggaatagaggacagagtgcagatggcaacacggaaacctgcaattactgatgtttttaaaaatgtgtgtcatagaccaagcttggtggctcacgcctgtaatcccaatgctttgggaggctaaggcgggagggttgcttgaagacagaagttccagaccagcctgggcaacatagcaagaccaaccctgtctctacaaaaaaaaaataaaaagaaaaaagaaaaagttagctgggcatggtggtatgcactggtacttggaggcctgaggtgggatcacttgagcccaggagtttcaggttgcaatgagctatcatcacaccactgtccagaagctgggcaacagagtgggaccttgtcttcaaaaaaaaaaaaaaaaaaaaaattgtgtgattaactttcataactttccatttatttatttattattttttttagacagaatctcactctgtcacccaggctggagtgcagtggcgcaaacgtggctcactggagcctcaacctcccagcctcaagcagtcctcccacctcagcctcccaagtagctgtgactgcaggcctgtgtcaccatacctggctgatttttttttttttttgagatggagtctcacactgtcacccaggctggagtgacacccatggtggcgcaatctctgctcactgcaacctccacctcccgggttcaagcgattctcctccctcagcctcctgagtagctgggattacaggcgcccgccaccatgcccagctaattttttgtatttttagtagagacagcgtttcaccatgttggccaggctggtctcgaactcctgaccttgtgacttgcctgcctcagtgtcccaaagtgctgggattacaggtgtgagccaccacgccaggctgttttttttttttttttttttttttttttttaagagaaaaggtcttgctgtgttgcccaggctggtctaaaaatgctggcctcaagcgatcttcctgcctcagcctcccaaagtgctgagattacaggcatgagccatctcacctggctaaaatgttattttatacaagtattatatttcttgttagagtaatctgagcgcttaattgacatatttggaattaatcagaaaggctaatagttatataaatatattggattgtttgtgtgagactaattcttggtaaatgaacatgaactacaagaaatggtcgacattagtgctgataaattctgaatctttacatgaagaatatgtgtcacagctgagtgcagtggctcacacctgtaatcccaacactttgagaagccaagacaggcaaatcaccagaggtcaggagttgaagaccagtcttgccaacatggtgaagccctgtctctactaaaaaaaaaaaaaaaaaaaagccgggcgtggtggcgggcgcctgtaatcccagctactcgggaggctgaggcaggagaatcacttgaatttgggagaagattgcagtgagccgagatcacgccactgcgctccatcctgggcgatatagtgagactctgtctcaaaaaaaaaaaaagaatatgtgtcagaagagagaaagggaggtatggccttaatgctattttaatttataagatagaggcctggtattcttggattctggagcctatcaagacatttcaaggtataggtttgaattgaaaaagtatggaaagataagatgagctttcaagagggatgctgatcataagtctttagggtttattgtctctgtgactatggtcagaccagcttcactgtggaactggaacttaagaatgaaaaaggcagcatgctttccaactgcctgactgcttgttggcctcaccggtgggagctccagcatctcctttgctcgaaatggaccccaactgctcctgtgccactggtggctcctgcatgtgcgccggctcctgcaagtgcaaagagtgcaaatgcacctcctgcaagaagagctgctgctcctgctgccccgtgggctgtgccaagtgtgcccagggctgcatctgcaaaggggcgttggagaagtgcaactgctatgcctgacgtggggacagctctgctcccagatgtaaatagagtaacctgcacaaacctggattttttaaaaaatacaacactgagccatttgcttcatttctttttatattaaatatgttaatgacaataaaacaatttttacttgaagaaaaaaaatgaaaaaggctgagtgcagtggctcacgcctgtaatcccagcactttgggaggccgaggagggcggatcataaggtcaagagatcgagaccatcctggccaacatggtgaaaccctatctctacaaaaatacaaaaattagctgcgcatggtgatgcatgcctatagtcccagctactaaggaggctgaggcaggagaatcgcttgaacccgggaggcggaggttgcagtgagccgagtcgcgccactgcactccagcctggcgacagagcgagactccatctcaaaaaaaaaaaaaaaagaatgaaaaggtagcatggtggctcatgcctgtaattccagcactttgggaggctgaggcaggctgattgattgagcccggaagtttgcgaccagcctgggcaatggggcgaaaccccatctctatgcaaattacaaaaattagccaagtgtggtggtgcgcacctgtagtcccagctactctagaggctgaggcaagaggattgcttgagcctggtatgcggaggttgcagtgagccactgcattccaccctgggtgacagtgagaccccatctcaaaaaaaaaaaagaaggaattaaaaaataaactttagtttttgccatagctctttatttcactaatgtcctcttccttcgtataaacaaatactaatctctctaaatatagcaaactatcaaaaggaaatagttttgtaccctgttatttatgaaacttattatgacaaactactcctaaagcagcttcagctatgattgaataaatgctggaaatccaggataaataagatactccacctccactttttaaagtaaataaatgatttgtgtttttggaatctcaagaaatttatagccaggcatggtggctcacgcctgtaatcccagcactttgggaggccgaggcgggtggatcacctgaggtcaggagtttgagaccagcctggccaacatggtgaaaccccatctctactaaaaatacaaaaaaaattagccaggcgtggtggcttgcacctgtaatcccagctactagggagtctgtggcaggagaattgcttgaacctgggaggtggaggttgtagtaagccgagattacaccactgcactccacaatccagcctgggtgacagagcaagactgtctcaaaaaaaaaaagtttactttctcacatgggatatattttacagttggtcaaatgtgcttgtgtgtgtatatgtgtgtatgtgtattcttttctctgtatcatatgtgatagtggggtagtgccaaacattgttaactctgatgaataatgtctcttttggttagatcattcttaccttactggtatctcttactgtttccttacctagttatgctgttattgcctatggctgtgccagctgcccgaagctaacttgtgagagggaaggttgccagactgagttctgctaccactgcaagcagatatggcatccaaatcagacatgcgatatggcccgtcaacagagggcccagactttacgagttcggaccaaacacacttcaggtctcagttatgggcaagaatctggaccaggtataagttggcattatctcattgtctctttatttggtatttcatgatgtgagcccatagctgaaagaaattatcttattgtataacccaagtactccaaaggatcagagagcagaaaatatcatttgataatactttcaatattataataaagatagcacttccctctctgaccattataggttatccaactatataaaattgaaatgcaacaaaattgaattatgtagttcctactttcttagtaatatgtctcagattggagagcaattagttcattttgttttgctaggggctttttcaaaactttcattgtgaacagaaagacatttaattagtattaaacctgtgctgtttgccttcaagctgacttaagtgcctcactgcctttggaagtagagtacagattgaagaaaaggaaacagtattagtatagattaatgattaaccttaaaaggaggaatgtcacacattcagctccaaccttggcgagtcagaggaaacctattttaaaatgtcagtggatttattgctttgtacttttattttgctgatgtcatttgggagaggctagtaggaaagattttgccattcactttttcctggcacagcataatttcctaaattgtcattttattaggatagttcataacttgctctgaaaattaccaagtatatggtagatagcatacccagttgtttttaggttttgaatttgaaagtatcatgggaagggattgtgggctatgttaacagcaaatcacaatgatacatgttgaacctgaaaaataaatttcccaaactaaagtttttaaaaatgtaaagctaattccaggctgcaggctattctttctgtaggattcttcttttaaatctaccagcctatcgactggtagaaatttcatttttcttggaaacatctttctccctaaggaaatctccttgctagaatgtggttcaagtgctgtgtaagatgccagttgttgggataggcagctcaataagagacaggattcattttatgaaaattcctgaggtctagacatagccaaccttccagtaaagtgggttgtacaatttggagtgttcagtgaagagttcttgactgctgcctcatttcttatatatactcctaggaacaattaaatcaaactggatttaactaggggtattttttctacccattcttcccccactcatagcagatgacatcaagccatgcccacgatgcagtgcatacattatcaagatgaatgatggaagctgtaatcacatgacctgtgcagtgtgtggctgtgaattctgttggctttgtatgaaagagatctcagacttgcattacctcaggtaagatgggaaatgcatccattcctttcgtagtctcattctcttactgatttagggaaaaggatgtcaaaaagacacatccgttctctcattacaggtttaaggaagctgtgaaaacttcttctgacatgctcctctaatcatgttttcaccagctactattctgtttctacctttctttgcttgccatattacaggtagtctggacttgctttttcccttttgctgtcttgcctccatacttgttcatgttctttcctttgcctagaatgctttctgcctaccttccagtatcctccttttatctcaacttgttcagttcttatcttttaagagccacttaaatgcctttcatccatgttgcctctcctttttccgcctcattctttgactttcttttatcttttgtcataaatatcgtcagtactttacacttcacgtacctatcttatcttactaaactgtaagtatcttgaggctagagttgtgacctttttacagttttttgcatttagtgagttcccaaggaattcattaagtgaattctttttttttttttttttaagacagagtttctctctgtcgcccaggctggagtgcagtggctcgatctcgactcactgcaacctccacctcccaggttcaagtgattgtcctgcctcagcctcctaagtagctgggattacaggcacctgccaccatgcccagctaatttttgtatttttagtggaggcggggtttcaccatgttagccagcctggtctcgaactcgaacctcaggtggtccgcctgcctcggcctcccaaagttctgggattacaagcgcgagccaccgcgcccagcctcattgagtgaatattaaaatgttgtggaggagttaatatttacaaacaaaatgtttgctaatatttacaaataaacaaaatgtgttaatatttacaaacaaacattcattgtgtaaatgaaacacaacaccttcattgccaatttgtcgaacatttgagtacttactgtgtgctagtcattggggacataggggtgagtaagacatgatccctattttcaaaattgtttatcccttctagtggagaagatagcacaaagagaatgggcaaaaatggttgggcacagaagggctgactgtaaaagtagccaaactcagaataccaaactgatagaaaggttatgatgaggtctttttatatcctctcccacgaacatggtttgcagtatctattaggtatggtaggacatatgccaagaaaactacacaaatcagagtgttcattagtgcagggtgcagtgtgtctggatgggatgtcaagtgcataaggctatgcagcatcccaagtattgtcagtcatggaagctagatcagttttggtgggttagggaagacagaattcagcagagaagaatggaaaaggaatttcaagtctggaagcctgtctttacaacaacaaccaaaaaagttaaagagcccagagctctaatagtctggccttgtcctttgctctcccttgtgtaatgtattcatttcccataaactcttctgttaatccttactgaaaagaaggctgttgctgttatcaagccctatgataatactagctgtatttgtaatgttgacattaacttcagtctgtttcccctgcagcccctctggctgtacattctggggcaagaagccatggagccgtaagaagaaaattctttggcagctgggcacgttgattggtgctccagtggggatttctctcattgctggcattgccattcctgccatggtcattggcattcctgtttatgttggaaggaaggtaagaaagacatgctggtttctgtgcttgtttcaactttaggttcgttagtaaaggtttgagggaaatgggaaggagctatgtttcagagctgcctgaaaaccagctggttcttagataaaaataaccttactttcttaaatggattttcataaacccccatgagatctgaaagttcttattaacatcctgggcctggcttgtctcagtgacttaaaggtagaatgctgggccaggcatgatggttcacatttgtaatacgtggcctagcactttgggaagccaaggcaggtagatcagttgagcccaggtgtttgagaccagcctgggcaacatgacaaaacccatctgtacccaaaaaaatagaaaaattagctgggtatggtggcatgtgcctacagtcccagctactagggaggctgaggtgggaggattgcttgagcccagggacgtagaggttgcagtgagccaagatcgcaccactgcactccagcctgcatgacagactccaaaaaaaaaaataaaagaagaaggtaaaatgcttacttcattctgctggagttattttgtctctttttggattaactttgcctgtattactttatatcttccaggtctgagttaggttaaaatttgataaagatgcctatttggggtagaggatatgttttaatatagataacttacaagtgaatattcacctgtcctttttttctctggcaaaagattgatgtcctaacctgctgacctggattttctttttttattcttagattcacagcaggtatgagggaaggaaaacctccaaacacaagaggaatttggctatcactggaggagtgactttgtcggtcattgcatccccagttattgctgcagttagtgttggtaagctagtcaggaccacacctcttctctctcagctttctgaccatagcagtttagccagatggccagatgtttctcaaagactcctacattttatgcgaacccaccttgatagtaaattctgttaggcaccatgattatgattatttttaagtttttcaagcacaccaaattatcagagtgtgcaatcttttgttcttaagttagtgcctagaactccatttggcacatagaaaaggttgaattacagaaacttattttaagccctagttttcacctttcatcttccttctctacttgccatgaaatccacaaaacaaaattacttttgttttgatttgtttaatgcttcacattactttgggaggcataagagtttgttttagaataataatagtgtaactaacatttaatgtggctcttcatgtgccaggagtggttctgagacttttgcatatattaatttatttaatcctcacaatccttacaaaaggaagcacaattttaatagaaaggtgcagtaattggctgggcgcagtggctcacgcctgtaattccagtgttttgggaggccgaggcgggcggatcacgaggtcaggagatcgagaccatcctggctaacacggtgaaaccccatctctactaaaaatacagaaaatcagccgggtgtggtagcgggtgcctgtagtcccagctacttgggaggctgaggcaggagaatggcgtgaacctgggaggcggagcttgcagtgagccgagatcgtgccactgcactccagcctgggcaacagagtgagactccgtctcaaaaaaaaaaaagaaaggtgcagtaattttcccaaggtcacttagctgggacatgaatcaagttaatctgccttcagatcctgttctcttaacagctaagccattctacctcacacagcagtaagattttggaattaacatcctgaggagatcctaaactccaagcagtagtcacttatttaatatttgattcttgattggctcttgattgggttagcatttcagcagtgattagaagaggggaaaatgaaagcaacatatatttactgtgcaaaacacagtacatagcattctcatttgattattgacaaccctgggaagataggtccaaggttatacagctagtaaatggagccaagaatctaatccagacctttctgatttctagcctggtcatcattctgttacaccaggccacctttttgggatagccactttctgtcttcctttctttataaagtggtttgtccatgcccagactgggaagaagaattcagggcacttgcaacctaatagccagctgacatgtttccttctcttcccccaggtattggtgtccccattatgctggcatatgtttatggggttgtgcccatttctctttgtcgtggaggcggctgtggagttagcacagccaacggaaaaggagtgaaaattgaatttgatgaagatgatggtccaatcacaggtaaaaagcaggatgtttatttccatttgaatttatgatatacaagataaaaatcagtaaaattcagcgcattttacagggagattgtcattggattactttggataatgagctttgtagggggtaaagtatttttagcttttcatttctttgttccaaagttattaggttaattcccctggtacttgcctctgtgtggcaggtacaaactagtaggaatccaagtaactccaagtatgctggtagtagtagtgattataataacatctttatatctgcacagtacttgataattttcagagtattttacacaattatctcacttgctttttacaacaaacagctctctgacgagggaggatggagctgttatccccatttaaatgggaatttctttttttttttttgagacggagtctctgtcacccaggctggagtacgatgtcgcgatctcggttcactgcaacctccgcctcccaggttcaagtgattctcctgcctcagcctcctgagtagctgggactacagcaacgtgccaccacgcctggctaattttttttttttagtatagacggggtttggtgtttcaccgtgttagccaggaagatctcgatctcctcaccccatgatccgcccaccttggcctcccaaagtgctgggattacaggtgtgagccaccacatctggcctaaatgggaatttctttaagctttcatcttactatctattaagagcttcacagagctgagactagggcaagtcttctgacttttactttaatgtggtttctactcgtagtaagtaacgtagggcacaagtaacgtagaaaaccccaaaggtttttctagcttccttttttcttttctttttttttttttgagacggagtcttgctctgttgcccaggctggagtgcagtggcatggtcctggctcactgcaggctccggctcctgggttcgcgtcattctcctgcctcagcctcccgagtagctgggactacaggcacccgccaccacgcccggctaaattttttgtatttttagtagagatggggtttcaccgtgttagccaggatggtctccatctcctgacctcgtgatccgcccgcctcggcctcccaaagtgctggaagtacaggcgtgagccaccgcgcccggccggtttttctagctttctactagaagcttcctattaaaatcagcacatgacccaaacatattttttaaatcttcacgtttggttacatggaagcaacagtgtagtggaaagaatagtggccttggaatcagagttatagtttcatgtaactaccatggccttggacaagtcatttagttttaaattttagttttctcatctaaaattgaggctattaatgcctagttatttggaggattaaatatgaacatatgttaaaacacctgatatgtggcgactgcacacagtacctgttcattaagtaaatacattagttctctgaaaagtcattgcaggaaaatgcctactgactgttttgatgctctgctgtcttgaattggatgtttggttctatccccagtggcagatgcctggagagccctcaagaatcccagcattggggaaagcagcattgaaggcctgactagtgtattgagcactagtggaagccctacagatggacttagtgttatgcaaggtccttacagcgaaacggccagctttgcagccctctcagggggcacgctgagtggcggcattctctccagtggcaagggaaaatatagcaggtaaacaaatagataatttctgacagaaatggttagaattataagaagtaacacattgagccatttctctgtgccaggcttgtgccacgtatcatcttattttgatttaattgtcaatggttttgttttgttttgtttttacttttttatttttaaagacagagtctcactctgtggctcaggctggagtgccatggcgtgatctcggctcactgcaagctccgcctcctgggttcaagcgattctcctgcctcagcctactgagtagctgggattacaggcacccgccaccacgcccagctaattttttgtatttttagtagagatggagtttcaccatgttagctaggatggtctcaatctcctgacctcgtgatccgcccgccttggcctcccaaaccgttgggattacaggcatgagtcactgcgacaggcctttttttttttacttttacaaataggaaacaagcttagaaaaaaaggttacgtcagttatgcaaagttcattgttctttccattgcaccatagctgcctctatataaagaataatcctgacttgagattcccccttgactgcctgaggctgcctgcttcaggaagggagagtaggcatttttatagaattcgtaaaatgctctccgttaggcttgtcattggctttcagtagcatttatgctgtatcatggcttatttattttattttatttttttgagacggagtcttgctctgtcgcccaggctggagtgcaatggtgcaatcttggctcgctgcagcctccacctcctgggttctagtgattgtcctgcctcagcctcccaagaggctgggactacaggcgtgcaccaccatgcctggctaatttttgtattttcagtagagacagggtttcatgttggccaggctggtctcaagctcctgaccttgtgatccacccgcctcagcctcccaaagtgctgggattacaagcatgaaccaccacacccagcccatcatggtttattgatagtgggctttggggatttttttttgttttttttctcactgtgtcatccaggctggaatgcagtggcacaatcatggctcactgcagcctcaacttcctggactcaggcaatcctaccacctcagcctcctgagtagctaggactacaagtgcacacaccacacccagctaacattttaaattttttgtagagatggggtcttgctcggttacccaggctggtcttaaactcctggcctgaagccatcctcccaacttggctcccaacgtgctaggattataggcatgaaccattgcccccagctggtttagtgatactgcaatccttattacctttctatttccatttgctagataaggaaaatcaattctatgtacttgtgttgaaaatatgtaaagctttgtaactaaaaagattgtgacttgcttggtcatttcactagttaggcagaccagagtgtatattttcagaggagcataacatgttgcctgagaagcagttgaatgcaacggagaagaaaggcctagggaggggtaaaggtagaacaaagcaggataggaaggtagaggagatggttgccttcagctatccaaaggaccttcaactgtgaaaaggattagacttctatgcctcataccaaaaggtagattaagatgacttggcagaagctaaagggaaactaattttggttcagtatagagaatatagggaaaagcaacatgaaagcccaaagaggaaaaaggctactttagtagatactgagctgcctatccctggaaatgtttacaatgagaccagatggctatttggctataagaaggattcaagcaacagatggcaggtggactggatctcccacctgagtgcctgtcaatcacttgggagcctcttaaaaatagacttcagggacccatcccagaatgagtagcttagaatttcctggagtggcacctagggggtgatccgtgttttgcaaaagctccccaggtaattctagcacagccgttgcatgaaccagcatctgacaaccacctaagtaggagccctttctgaaagactcttccaactcagagtgattctgtggcagacctgaaactagaagccaggtctctgacactgtgcactttccattgcattccctcatttccctgggccttggcacatttttgaagggcacctgaagctggagcagcaaagcaaaggctcaggcagtaggatggaagctgcttgaatgtgcagctgcaggctgctactgacccgtctgtgcatctcatgactctggttgtctcttatcaggggatcccgcccccacatgctggcatattcactgctgtgctttcttaaaaccaacacccctgtaaataagcagacagacataattggagactgacttgctgaaactgcagcttagccagtccagctgttctagttctgtgaaagcctttattttataggaagtgaatgagtcagatgggtttgactgtgaaacccattataaggaaatacttaactgtgcaacaaagtgatgttggagccaagaaaggcaatagttatgggctctgagacactattgggaaagtttgctgctccaagaggagggaagaggttggctcctgtatgtccttcagtctcattccctggaggtaatttgattgttaaatgtttgatttcctattatgtgcaaggcagggaaggtaaagtgtgtatgagttgtggtctctccttttgtggagttaacagacaagtgagagatgcataataataagtaggcagggcctgcgcacgcctgtaatcccagcaccttttttaggtgggtgatcacctgaggtttagagttcaagaccagcctggccaacatggtaaaaccccatctctactaaaaatacaaaaattagctgggtgtggtggtgggaacccataatcccagctacttgggaggctgaggcaggagaatcgcttgaacctgggaggcagaagttgcagtgagccaagatcgtgccactgcactccagcctgggtgacagagtgagactccctctaaaaacaaataataataaataagtaggcaggtgctgtgggagtacttagcaagaagtgaatggtttgctgggataatgaggggaagtgatagttcctttgttgttaaggactgagtataagtttgtctggtagagaaaggaaatttctagagagacagaatagcatgtgcaaagtcatggaagtataaaatgtataggtatttaaagaaagaaagaattcagagtgactatgatttcggatctatagggagtgatagaactggacagagagcttcctggcagatcaggaagaccttaatgcctgttggcagtagggagccaagagttagagaattgttagagtgattgggtctttattcacactggcactgttctagaggttgtttgacttggacttaagggctactggagagggagcccagttttagtcatccaggcaggagatgatgaaaacctgaagttcagcagtagctgtggggatagaaaggaggggacgatttcaatagatatttaagagaaaaaatgtatgggcatctatttgcgctgtttgacagttggagaagatcagacagacaaccacaatttgcaagagagtaatggaagagatgtgtgccaggaagcagactgtcttggaatacccaggtctcatattaacttgaacgtcccctctttacacaggttagaagttcaagccgatgtccaaaaggaaattttccccaaagacacagccagtcttggtgcaattagtgacaacgcaagcactcgtgctatggccggttccataatcagttcctacaacccacaggacaggtatgtgaacagtcagatgtccaggagaggttgcattttttcgttgggtactaggtcttcagaagttcaatgcctcatgttagggctgtatgtaccatctcctgggatatatagtgtaacctgtgaattcatttgagcaagttcttggtacttgagtgtttggcatctcttgattcttcttgttagcgcttgatttttagagatttcttttctttcttccttttatgtattttttcttttttttttttttttttttgtctttcttggctattgcaacagtgtataattacatggaacttaaagagctagattgatgttcattgatgtcttcaagtctagggtttctgcttgccctttgcttgataggattcccatagcttctttctctttcattttgagaaactggtgtatctgggatggtgtgattgtggtactcccactagtaggtattctggcttcttctacttgtggcatggtagtaaaaagcttttacttttctattttgagtaagctagcatggggctctgacccttagttgaattttggaagctctttctgtatgtttaaagagattggctgagatacacgtgtgtgtgcatctgagcacacgtgtgcatgtatagttaaatcagcaaaaaggatctaattactcttctccatctcatttatttttatttttgtttttttagagacagggtcttgctctgtcaaccaggctggagtgcagtgacacaatcataactcactgcagccttgaactcctgggttcaagtgatcttcccatctcagcctcccgagtagctgggactacaggcacgtgcctccatgcccagctaattttttttattttagaaacagggtctgactttgttgccctggctggtctcaaactcctggactcaggcagtcctcacacctcgacctcccaaagcgctggggttataggcatgagccaccacgtccagcctccatctcatttgagtgttagattaaaatgttatttttgttaaaagtgagctctagttaactgttcacctatctttttgaaattcctaatcctgaacccatgaactgcttttaccaacaggtttagcatgatccatgcatgactcagcaaagtggattttgtctccacagagaatgcaacaatatggaaatccaagtggacattgaagccaaaccaagccactatcagctggtgagtggaagcagcacggaggactcgctccatgttcatgctcagatggcagagaatgaagaagaaggtagtggtggcggaggcagtgaagaggatcccccctgcagacaccaaagctgtgaacagaaagactgcctggccagcaaaccttgggacatcagcctggcccagcctgaaagcatccgcagtgacctagagagttctgatgcacagtcagacgatgtgccagacatcacctcagatgagtgtggctccccccgctcccatactgcagcctgcccctcgacccccagagcccaaggtgcaccgagcccaagtgcccatatgaacctctctgccctagccgagggacaaactgtcttgaagccagaaggtggagaagccagagtatgaagtggaatgaatgctcctgttctgagaagcacacttgtaactgcatcttttggaatttttttttttttttttccaaggggtagagatttatgtattttatttcacagattctctggtcacaggtttttgcccagggaaattctgagaaattcacaatttcttaccagataaaacatgaaaagtttgccgttagttcccctcccctcccctccctctttttagttttaatttattggttaaactgatggcagcaatccatgaggtgtgtcaaagagtgtacatatgtatgtgtgtatattgaatgctaaacatattactgaaagacacattttaataaagatttctgtcataattcaactta

SEQ ID NO: 9 - DNA, 89129 bp, Homo sapiens
  source 1..89129: mol_type = other DNA
atccataatccagcgatgctgcagctgtaaaagcattaatagaaaatcaatccacaacctcgcggggcagcgatcgtcgagcgccgtttccaggctgccttccctggggtcgggagcggccccgctccccccgtggctggcgcggaatgtggtgatccgtcccggggcggggatgacttcatgcagccggagctccgcggcgggagcggaggctgctgctggcaggtggggcgcgggccggcgcgagctgaccgagcactcggcgggcgcggcgggactgcggcccgtggcggcgtgcgcggggacctgcgctgactaggtccggggaaggtaagcagcccggcaccggtgcgccctggccgcactgcgtggagctttccgcttggttaataatggggtttgcagcacggagggaagaaggggagaaccccgctgcattctgcaatgagaaaaggagcaacaactaggatggaaatgttgggcggccaagtgcagaggttggaggagcagtgttactgggcaaacaaagaaggcgttcttgcctctatactcttttgaacgtgatctaccatttcagtgccagattcgcgtagacagtgaagaggactcaaaatttaaaataatttgagttactcttttgctttctgtgccttttaccttcgcttgagtattttgaggatttggagcagtaggtccctggcagcagcctgaggtaatcagaaatcgtccctcttcctgtagtccttggtcctctccctttccagttatcagaatgggtctgtgcccctctcaatggcaaaacacctgcttcaagactgaacctttagaaagagcctctatctggaggggaaacttctcttatctcctggagttcagcttgggttgagcagcacttgacatcgcttcttccttcaattgccattttctctgtcaatcatttcattgatctttttcggagatgctgtgcccattcacagaccaactctcgtcagctcttatccaccacctgggttccatgactgattttgtcaaggtcccaaaaagggcattgcctcacacagatttcttattcggtattctccctgtatactgttacctgtgtccttcccccaaatgcatggaatgaaatatcctgcttgtggccctgtaccaacatgttatcccattaactcccttcgctgtagtcactgtggctacttgaaagctagagaggacagatagaatctactggagtgtgagggatgttccctatgcataggcataggtagaagtaaaaatgtgaatgccagtccatccagtttttcttgaagcaattttagtccagttggattttgagacagctagctgttaagatttgggacaaatcctttccaaaaggcagaggagtccgtttgcctctaggattcctcaagaacctcaaaagagtttccagtgaggttttcctcgtaggcagtcagaaagccaatggagctgcccaatctaagcctctggttgagtatcctctagtttgtcttgccatttgcaggttcctatccctcgtcctaggattttccccacagaccccttgctactgagcccaagtgcctatccttgttgccacctagagatgtacatttgaataatatgctgtgaaatggttaagatggctgttatggggattgcaaacgtgccacttcaccaacagagaacagttgcaataagccagattgtggggtatctgtgtgccaatgttctatttaaaggaagatctgttatctttaaacttaaaattacagagactgtctgactcaacagccatgcaattttattttagtaaattaaattagaagatcaatgaaaaagaggggcagagttggtagcttaaaattttacctctttctttcctcttcaaatattatttttaagcaaagacactagtatggaaaatcgtgttaatcatattatatatcattattgcctttctattacaaatttcgtttttacaaaatgcactttagaaagatttgaatttgtttctttgtctccatcttcagtatatgaggcatagggtgagggtgtagggggtgggcaaagcccactactgagtgatccactccaggaactgccccttggggtcttaataaccttatgttccttttttgttgttgttattatgtgttaaacagggttttggtttgaaatattaacttcttgagattctagaatttttactcagtcacattaactatgaggtaacaaagaacaagatcaacaacaaaccctgtattctaccaccttttttctactattaaaatacttaaccatatacatcattattctgaataatactaatatagaataataatgaattttaatatagttattctaaataacctaaggtatatgaaatacagattagtacaattgatcttagaaatacaatgcagtttctgtaatgttgacagtcacctttctgttgaagagcaagtgcgtgagaatatcctaatgatggttagaaattcgaagtgtctatcatttagtttctgaagaaactaaactctttggcaagaaataggttcaggattaggagactggtgctgcctaaggtggaataatacttgctagtgattttgcaggtgagttgaacccactaagttatggactggagttggagaaatcttgttgagaagaaagaaaacaagttagaaaatttaattttcattttagtacaactgaggaagataatcaaactgaagggattcctgaatttggactttgttgtgtttaaacaagtttgaggaaagtttctaaatttagaaggctaagcagaaatatatgtatgattttatgtctgaaactgatttatgactttatatcctttccttaaaatgtttcctagggagaggaaaaactaattggctggtgttcagaattgaaagaggaatgaaaaatggaaggacgtgcatgattagatgctaaatgattagatactaaatgaactgcaggcacttttgtgtttgacaagatagaactgaagtcagtctactgctctccaattgtgtaaaaaaaaaaaaaaaagttttgtctgctagacagtgttaccagatatttagagagtaaaaatttaggagttaaagttgccctcttctaacaaaatatctttttctggtgctgcattactgccattaactacaattgaaatagccttaagatttgaggctgaggcaggaggattgcttgagcccaggagtctgaggctgcagtgagccatgatggcaccactgtacttcaaccagggcaacagaatgaaaccctgtctcaaattaaaaaataaaaacttttttaaaagttcagaaatgttgaaatggaaaaggaaaaagaatagcaataataaggctcaaatagaaatgtcatttctattcaaccagtgactccactgagaatgggtagaaaaaagtgctattttgaaagttgccaatgacctcttaattgccagatttctataatatttcaccctgttcattttataagtcctcttctatgttattcttggattcaatatttgtgtttaaaaggtaatattaagtactatgtatcaggcactgtgatatctcttaatctaatttgtcactaattcccttaaagtaccccatgcccaacctaaaccaagtggatcttctttccaatttgtaccccatggtggcatgcctatgtgttttcatttattctgttagcccatcctcttacatgtcgaaaccttgttcacctcagatactgactcacttatgaagccttccccatacccatcttccttccccaaccagatgtgcccctctcttgtttaaattcccatagcacattctattttgggttatcctttcatgtgaacatgctttgtctgctcttctaaaaaaaactcttgaaagcagggtctgggaataagtttttattacctgcaactctatggtgtctagctacatatatgtattataggtgttcagcaatttgattttagtgaagaaataagttattttccagagttataaatctatctacctacactcctctaccagccaagttaagttctcaatatatgtgcaaatgctaatttggttttttaaaaatcattatagtaataataaatatactgagagtacattcaaatcattataatctacaaaaggtattatgagcttaaatgtccttaaatggatactaaaagcatggtgagcatagcaaaaccaatctttaatgaagacattgtacctgctttcagtattattgcattgaaggcaccttatgcatatgagcatttatcttgtttcaagccactcatctagggactttcatctttggtatctcatttgatgtttatactatatgtgaattttacactaagaaaactgaggctcagagatgtcacctgaatggcagagattttttccatattaccacccgctctttgaagtgtaacagagtgagggaaaacattgtaaaaacataaagtcagagccatcagaatagtttcaagttgttttgtgattaatctttccagtgctttttaaacttttaggttaacatctcaaacttttgataactcagtaaagtctgtacatcttctccccaagtacatacagaagcatacacatattaattttgcatacaaatgcaggtgtttgtggattcactaaagctctctttacagaatagttaaagaacatctatttgtgctcccttggacaatatgtgtgtcctttattagcccttacatttccagtacttgagatgaggttttccttctgtttttctccttactttaagacctgaaatgagagcccttcaccaacactgacatgaagacagctgatgactaggaagcaagtgctagtgaaaatagtgactcaaagaaccttgattcacaaaaaaggcatggaaagggagctccgaacgttacacattccaaatgacttatttaaggttttccaatcaaagccatttttacaaaaaagaaactgttctcagacttaagagtattgtactaccacatatgtgggaaaacattgccagcagttgattggtgtagtttactttggaatatattcagttctcttaggatggacttattaactgtctcaatattaatatttctttatggtaatgccatcttcagtaatatatttgcttttgccaagttaaggaaagaatgataatttatgttcatccctcctaggttctaaaacaagtgccatcctgaaagagctgcatatcattttagattcataaaaatgcattcagattctcagctgatacttaaagggactggtactagcaagcacggttcctgatgtatttaaagagcgttcaaagaggtgtgacaagaacaacattagtctggaaaaaaaaacagagatggaaagatagaaaactcaaaaggacaacttaagctgttaccttctttacatttcccaaatacctttttttgtaccaaaataagattataactatataagtgtctaaaataagtaaaatgttatgaaaactttataatgtgctccatatcaggtaagtttatattttatagattttataattaaaattttttttctggtaaaatatacgtaacatttactattttagctatttttaactgtataattaacaatgttgggcaactatcaccactatcagttttcagaactgtctcattatcacaaacagaaactctatacacattaaacaataaccgttcatttcctcagcccctggtaaacactattctactctctgtgcctatgaatttgcatattctaggtacctcataagtggaatcacttatggaatgttctggaaccctttcatacatatttgtccttttgtctctagcttctttcacttagtataaatgttttcaaagttcatccatatttcagcatgtatcaaaatttcattcccttttaaggctgaatactatttcattgtatgtatataacacatatggtaattttgaattgcaaaacactttcagtacattgtctattacattaaacatggctagcatataacaccaccatattatcttccatagatgtcaagtaatatacactatgaaggtgccataatttatttggtcaaaacccattgaaaaacatttacttaattccaaattgttttgtgacttcaagttatgtggtaataaacagagtatattaatccatatgtctttatatgtcagtacttttacttttgatcaaagaatgcttggagtggaattattgggtcagagattatgcccagatatttatagtttgagtactctagatactgtagtttatagactataaaaatcctaacattctgtaacagatagtattactgaatgttctggaaccctttcatactatcttaaaaatgaatacagatactataaggaaatcaactgaacatgatccgagcaaagaaatattctctcttttttcatttccagttcatggaggaaaaatgctatacacaagtattgagagagaaagtctctcaatcatgcatttttttatcatagatgacaaagtgcatcatagatgtcagttaagtcttgtaataacaatgtggaatagtagaaacatctctagctagtttttagggtttttgtttgtttgtttgcaccagcaataggttatttgcatcaaacctaatctaaaatttggtctgtttgttcagatttatgtacctacattatggtaaatcttttatttttttttcttagtttctctttaatgtattatttttagtttattctgaaatagaataataaagcccagtgataacagtgtcttattgaagctaaactacaaaatatttggcgtatgtgaagtataaacagaattggcaagacttttaaccatcctcctcagcagaagacagtctctattgcatcggccaggagaggagaaacagaaggcttgctggagattgcattagtttttacttaaacattaaaatgctaaaaggacaaagatgaagcaacatgtcttataatatatgtttgagtatctacttaaaactaaagggttgctagaacatttatttagttggacagacacactccacagtgtagctgaccctagacatgtcacaactgcattttaaagtatgctttttcttcagttgattggggtggggggaattattaataaacatttctcctatggtttacctctatctttatggttgtttgattaaaccctctttgaaaagcagacgtaaaacaaatcagcattcttatctttgtctgaataagcaacaccatggccataccttcttaatgcactgctgtggttatgagaccaaagggtagaagcagcagttttttggtcattgcaatagtcacagcaacacaacctgctacattcctcacttatatactgcagaatctgaccaaataaacacagaaaagtcagtaatacctttaatgcaattcttgcacaactctccatgatctttcatacacagcttctctgataattgaaatgtagaggaaaataacctgaatgttaagaccccttttccatttccaaaatgtaattttgctgggacttgcagaaataacattgaatctgaaattagtgggcatccaatggagtcactagaaataatctgtcaaaatcactcaaatacaaatttagatttaaagaccaggaaattctaaagagtaactatggtaatatattaacaatttaggaaaggaacattatacatatatatttatataaatatttatacatatttatatttatacatatatatttatatatatataaatatatataaacatttatatttatatataaatatataaacatttatatttataaatatatataaacatttatatataaatatatataaacgtttatataaacgtttatatatataaatatatataaacatttatatttatatataaatataaataaacatttatatttatatataaatatatgtataaacatttatatttatatataaacatttatatttatatataaatatatgtataaacatttatatttatatataaacatttatatttatatatatataaacatttatatttatatataaatatatatgtttttatatatatgggtttctacttataaggtataatcactggagaataatggatttttagaaatgattcattctgaaaagactattttaccacttttttaaactagtgccatcaaaaataaattgtgacaagtcactgtcatccaagttagtctctcacgtggctctcaaggaagtgagtagttcttggggaaatggctttcttcaaatttgtgctttcctgcagtgagtcaagctgagataaaatggggctgatgttcttaactatttgttacatgcccatatttattagaattacctaataatcagtaaaaaagagttttatgataactaaaaatgtacctattgagactctccattgataaaagttggctaagatacagctggtgatcctgtagaaatctaaattacatttttttcatcttctccatattagagaataactcaggatttcaaagcaaagcatgaaaaagtagcatttgatatattttatcaatgttaagatttctggggagcttatcagcatcatatactaagcattcaataaacgtaaattgttatttcataagtaaaatatcaacagcataaaaatttctgtaactcaaatggccagtatggtacatggctttaatacaggagattacaaaacattagttgaacaacaaaatgaactaataccatttatttctgaaagctaccccccaatacaaaatgattggtattctacacaagctcattgtgattgctttagtatatgtggtaggagtaaattatggatagaactaccctcttccctggttcttttaaaaccatactttcttccctctggggtattataagttggaaattagaggtgaatcatattttagtctggaatttatctagtaagcagttcaagacacttaaccatgcaccatctgtttacccagggcaggaaaacatgacattccccttttcaactatagcagatggggacttttagaaaactcagaatgcaagatagagattataatgatggagtattagtcagcacttcttttgtctgcatctctttttcaatctcattgattgtaaagaacacaatcagagataaagtacagttactgtcaattgaaaatgttttcaacctgcatataggtgtgagatagtgggcctgtcacatcttcacgagatatgttggaatgactatttcaccacaaaattcaaacgtgacactaaaattatctgacactaaacagtccattaaataagaggatgaatgttggcatcttgctcatctatttagaaaagaaaaatcactaacagttttaggcaatacttaaatgtttaaattttttctaataaaatggaaaatgaaataaaatggcattacggtgttatgaaagcaaagcaattaggttaatctcaaaatgtctgactgtaaagttgtaacaattttattcttagagctctcaggcagcttttaatcattttcaagttcaatcaaaaagctctaaccattatcatgaatatattctgatcactgggctttcctcctcccttttgctatttatttttaatttatttatttggggacattttggctaccacttatgtctagatcatgtttttcaggaaatgaatgtgggctttgaatcatacctttaccatttactagctgtgtgatttatacgttactcaacctctgtgagttgtttcctgatatttaaaacaggaaaatcaccgagttgtggtgaagatgaaagaagataacataaaggagaactcagtgaagtgtctgaaatatacatggtaaaggttaatgttttccatttttatcatttttatttccactgacaatttacacagccagacctcattactacatcttttcccaaatgttcatgaattattttttctacccctccccatgtaagttaaacttagccttgaaatgaccctgaatctcactggaaaatgtcttaatgcagacactgccagtgtcaggagaggttgggtccactgtaatgcgaggttgttaggctctgatcagcagtggctgtgggaattaaacctagcttctatatttaactcttcaagtagttgattggatcacctggcaaaagtcaattggctagcaatccttcaccttattttctttgaattgtaccacatgtctaatcactcgtttcactggctcattatcagaaatgatattacgggcattaaataagggtgcttatttcagaagcaaagtgccatataaaataggaatgtcaaaagtctttgaagatcctatttggctaactcaaatagttgttgtttccaatatgcaactattggagaagtttcatattattaagttgtccaaaaacaaaaattaaactaactccattgtaggtcatacttttgttggtctgtgatacatttctattttattgaagcccgaagaatttacagagaccgtgcaagcattattattcagggacttgtttattattaggtgctactgattagatgtgatgaatagcaaaactgttaaacaaaataaaaaaaaaaaatagagcctcacttactgtggaatctttactaggagaaacaccagcctataaaagttgcatttttaatgacatatttacattagtatgatgacaatttttgttgggcttgaaaagcacacaattttacattttatttttcttatatggatttctgttattgatatgggccatttgggttttaaaaaacaagtacaaaaactgtgtaggaccttatatttaatatgtaaatcacatttatttacaggggagaattttgtggtgagcaagaactgcagccaaatttgtgataatttattgcagttggtagagtctcttcatgtattcctgggaacagaataacttcactctttcacgtaaaaagtataaatcatcagtgtaagtttgtcttaaatttccaagccaatattgttaatccctatttaaatactgaactgattggctgtttaccaaaggcttgaggggtaaatttggggcatagtctgaattaagatgagatgttggaaacaatgaaaatacctgctttaaacatgtatgtacatacaagtatacacatatattacacatattttatgtatattataaactataattatgtatatgtgtatctatgtatgtattcattaatattttcttcctatttcaaatatttgattccttgaaagttggatttcatttaaaataaagagacaagtgcttggaaaagcatgtgaaaaatctttgtttccagagccaagtttaacaaggaaaacttattttttcactggcagtttgtttttcaaagttatgagaatatgtttaagattttaaagtgatttatttaataaatgagtatgaatatgaatttacctatttcagattgctttatatgtcatattaatttttaagtatatatttatctgtttaagcttttctgaactagatcttaccaggttataactactgtccaattatataagaacaacaatatagttgcctttcagcttgaaaaatgcacctgtttcattttgttatttttttaacccataagttatttggccttccatcagcttttctgtcttgaggaatacattgtcctatgcataataaattattttgtacatctatgtttcatgccataattttttagtgtctcacaaagttctaacttggaaggtactcttttaaatcaagtttttcagaatatagacttgttctttgtgaattgtcagatctgttttttaggtatttctcccattttggagaatgagtagagaaaactgtaccatgggacatttcagttctttttctatacttactgctaataacatgccttctcttagtaaagctagaaagctgagaactgcagttaaatagccccaaggtaggacataggcgaaaaatactaaaatttgttcaagtacagtaagagaaccaaatttggtctggcatttaatttagtcttcctcactaccctaacccaagtagtatactagtaactagacttttaaaaaacagccatttgttgattaatggtgcctatttttgtttctgcttcattttaactttgtttcataacactattatacagaggcttattttaacaaatgccattagttggatcattgagtttttcttccgctttataactgattagctctacagttcaaaaatgcttaaaggccagacctgtcaattagaagatataagcacaatagaagtgatgtttctaaaattaactctggaatacatctctcttaatgttaaatacatataatctgggactgggtgcagtggttcatgccagtaatctcagtgattcaggaggctgaggcaggagggtcattaaggccacaagttcaagaccagcctggccaacatagtgagaccctgtctctaaaaaaaaaaaaaaaaaaaattacaagtccaggcatggtggctcatgcctgtaatctcagcactttgggtggccaaggtggggggatcacctgaggccaagagttagagaacagctggtactgtagcgagacctcgtctataaaaaaaaaaaattccttctggatcatttctagaacacaaatatttgtgacatttctttagtgttttcatttttattaagtgttatatactcatatttcatataaactttgtattaattttaatactagtttagaaattttaatttagtataaatacatcaactaatgttgaaattgctaaaactttagggtcaaaattaatttaaaggttactggagttactgttctggtttctagtaattggtgtctccaataaatgcatcagaaagacaaaaatagccatggttcagagtgtctgccctattaataacataccatgatatagcttacagatatggatattaacaaaatgatttattttagaacatcatttatagcctataaaatgatttgccaactgacaggcaacctttgacaataaaatatacctgctacttcctttttttgcaaattcattgtaccacatcagtgttatctcaatagtgtgatcaacagatgactagtaatgctcattctctgtaattcacattttaccaattactaacaaaatatggagtgggcaacaattctatagtatttaatcagattttcctttaaactgaagtatgatctatattcctataatgcttttatatctaccacttcacttaagtaaaagaaagttttctagagtttctatgtcagttttcaagtggatcagtcttttttaaacatttttacttaaaaattaaaaatactaatttgtgcatgcttaaatataaatattgaaatagtctgaaatatatgaaatgatcaaacaaacaaaagtatgggaatatcctttaagacatacaaactttgaatatatttagattatttaagctaaactttattcatttacataacaggtcacaggtgttgcctttactattaaataagattcttagagtagaaaataacatataattttttttgtaaaatgttaagtgcaaagaccagagcattaaacaataaatgatgcatacatggaggaaaatattaaaaggaaatttaaaatgtaaaagtcaattatcaatggttaaatcaagaagcagagagtcagtgagatcacgttatttccaaatttattcaatgtgtatatattacttgtagaactgcgtaaaaagaaattcatgtttggatgttctttaccatctaaacattgctgagagtgtggttgaaatgttcactttttagtagatttctggaaaatctaggctggccttgaaaatattaaatatagtagaagaaggtaagttttccctcatcctaaaattatgataataaattatatttttaaattatcacataattttcaaagcatttttatagtcattgtcttattggacaataccaactctctaaagttggcagaactagaattgtccttattttgcagacaatgaattcaaagttcatgaaatgtagtaatttgctctcttaatcagtatacacaattactaagtgttagagcaagaattcaagcctgttttgtgccatggccaatctagtgctgccctctatcctataggaactggtatgtttaagagttaagcataaacatggaaatatgcctggtctgcttctagttataaattcacttacaaacctcactggatcctgaactaggaaaatctgtaagggttatttactttcatcaacccaaagatgaacatgttaaacaggttcttagatttaattaaacttttttttttccaccatatctttgtgtctatcagcagctcctcttgagtataccatggcttcatttaaagagttgcattgcttaaaaaataaacattgacattgctgatcatttacctgtgttaaatatgccagtctagtttgcattgacataatgctgacatgagattgtatcatttgattatacacacacacatttactagttctaatttaagtagtaagttttggtccttactagaacatgatttatataattggcaacctaatggtaagatgcagtaatataatctatcatgttaaaagataactgaaattcacagaattctctcctataactgcattaggaagttttaatggatttctactaagcttctcttaaggataaaattttttgaaaacaggtcacttgtaagatctgccttagtttgttaatgcttctgaaatatcaccactataacctgctttttaaaatagcctgacacctactaagtaccctttcgccgcctacaagaaagcatttatatttttaattttagtgaagagttcctgatttaagaattagtcatttgctgtcatttgaatttcaagtatgttgtaagtacttgaggttctttctgtatgaattttcagcggagtttttacatttttcatcattaatttcatctttcacttgggatcagccaaatcaaaaagtttatgttctaccctttcttagttctcttcattgcaaacattcagaaccttctcaaaaataatatcatggcttgagactgtttattgacaaccgataatgccagaaattagtgattatggttttcagtttaaaaagcaaaatgagaaactgaagaaatggcgtttttcctccatttagctgatcagctattcacatcagtgatcattcgcttttgaggctaaggatacaaatgttaatgttttgtatattcatagaagtgaaaaataatataacagttattgtgcttagtctgtgctaagcactattctaaaaccaaatgaatttctcctaacagcagccctaaaaggtaggcattattattacctttttgacagatgggcaaattgaggcacagaacaattgagtaaagtacctgtagtcacacagctaataaagcacacagataggatttaaacaccaggtggtctgttttgagactccacactccacccctatagttaatataagggtttggatccctactctttgttgtatggccatttaattgctttgtggaaagaaagggaaggaggagagagagggaagaaggcaggagagatggcaaattcctgctagctggttgacatggtgtgctataatttataatgaagttcaatttaaggacttgtaaagatttcaatagaatagtcttaaatgttcactaatgaagtatgtggtaatatcagatggagatagcaagtgaatttcaatttagtaataaccataattgtaattcaatagcagtctcatatttggaacaaataaaattcaagtaactttttaacttttaagttcaggggtacatgtgcaggtttgttatataggtaaacttgtgtcatgggggtttgttgtacaaattatttcatcacccaggtattaagcctagtacctattagttatttttccaatttgagtaattttcacagcaataattctaccttttcttaaaattattaggtattttttcaccccaacactcaaagcttatttaatattaataaaattttaccttttataaaagtccataaattttagtaaggttgtaaattaggctgaaattacaaaacaaacaaacaaacaaatttagagcttttagccaaaggaaagcaccctcatcccactccagctcacccctgctcatttctatcataactgcttccctaagaaagaagaaatttttctaggcggagcttgcagtgagctgagattgtgccactgcactccagcctgggtgacagagcaagactccatctcaaaaaaaaaaaaaaaaggaagaaatttttctgattggtcagatttaattgaacattcactgagccatattttactattgcatcgggtcactgtgtatttaaagatacaaagcaggctggacgcagtggctcacacctatgtaatcccagcactttgggaggctaaggcaggcagatcacttaagaccaggagatcaagaccagcctggccaacgtggtggtatcccttctctactaaaaatattaaatacaaaaaattagccaggcatgatagggtgtgcctgtaatcccagctacttgggaggctgaggcatgagaaccacttgaacccgacaggtagaggttgcagtgagctgagatggcaccactgcactcctgggtgacagagcaacagagcgactctgtctcagaaaaaataaaaataaaaaaaatacaaagcaatggtgcccacattcttatttgtccagcgcctggtcttgtgagagcaagtgcagtgagtatccttgaagcctagaccttcaaggtcctctcctctctttcattccgtgcaccagggtgggcttcatctaggagaacaatggactcatttctgtcttttgcctgttggtccttgcagatgagtcaggtttcatttggagcccagaaaatcttacatgccctcttctcaacatcttcctttacacatgtctcagtaaatattaacatgctctaaatatgcccttgccataactctgaactcaggattaccagaaagtaattccaaagctgagacattttccatatcttaatcagcagataatttgtacttacattaacactgacttgattattcacatgttcgtttgcagtttgaatctatttctgtcttcaagtacttaaaatagatatagattttaatcaagatactttaggacttttattacatatttattatgtaccttatttcaggcatttattgtactaggtgctggcaatagaatgttaaacagaatggtatacaatctacattctaattttcaaataagattgttatgaaagtgtacttaaaattcaaacaggaaaagagggctgggcacagtggctcacatctataatcccagcactttagaagactgagatggaggagtgcttgaagccagtagttcgagaccagccagggcaacatagcaagaccccatctctacaaaaagcactttaaaaaaatttgccaggtgttgtgatgcatgccatagccctaactactctggaggctgaggtaggggtgtcactggagcctaggaggtccagcctgggctgcagggcaagaccctgtatctaaaccaacaaacaaacaatacaaagcaaaacaaacaaacaaaaagacacaagaaaagggtacagaaattgcatgcaaaaaaactcagtttaatatgcatgtttggcatgttagagatagaaaatatctaacacagaagctttacaagattaaaggttgattgtcacttcagctgaacttttacttaaaacaagcaagtgtttattcaaaccaagccacaaactcaaatagtaattatccaactttatagtttctcacttaagatagaatgcttttacttatgacttgtagtaatattaatatttcaagaaactaaccatcagtgttttcaaaattaggttattccagtgataaaaatttcaagagtttcccatcagttttatttcacgtctccaaaattagattaaaatgttacagttttaagtaaaaaactagtatattgactattgactcgggttcaaagttctatcagaaggtaggtcagagaaatccccagcgcaagaacacacccaaattttaattctgaaattctttcttggcggattagatgttggtatctcaacatctgcaatgccaaaggacgttgtcaagttattatcagcattcagttcagcactaggttttgagaatttagaagttttttcactactttttctcctcctactccatgacagattgcttccaacgctaaaggtatcttgactcattcatgcaccatacattcaagaaatacatacatttgagttactgatcacatatactattccaggtatggtactggtcactaaggcatcaaagatgactaagacacagacttggctctcaaagggtccccagtgtagtgagactctgcttcttactcttcaagtagtatcaattatatgcaaccagaaataacagggagttaagtagcatttgtatcatattaaatgtagattgggccatgtaatttctcaaaaatcagattcaatcaaggaaagcatagactattctttgggatttgcccttgctgagtatcattatctattcttgagacgtaataatagaagttagtgagcagttcatcaaatacagccctatggaagccaaaatgaatattttctttagtcattgactttctagacattgctaaggcatttaaagtttccctgccaagaaatcaccagtaaacagcagtgatggtagatgcaggctatttactgccatgagttgaaaaaattagtgagctaccttttgattgcttgtcaagcattttgacatgttaggacagaaagcactgtttaaatgtaaagagcagttcatgtagaattgctgtaggtcatcctaatgaggaagtgatctatcaagtgaaagactggagaatgggagaactgccatgatgtaagattgatttctgctaaagagaccttaaatttggctgtgtttgaatttgtggttccttccaatagtttgtaaattacccacagtaagtacccaatataaaaagctattcaaatttactttccagcatactcacattggggattttttttccttcttttttctgtttctctcccagatcaaaagaggagcagtgagtctcaaggtttagggatggggtccacttggagtgactgactcagtaagcctgagtgcaaccttgggccttccagttttaacaagttcctagaaaatgcttttgctgctggtttgtggttcacatttgaccaaatcactgctgaaacaaaactgctgggggaggaggaagaaagaactatgaatcactaagccagcccctgaacttgctcaccaaactgtccagtctgctgtgactataatcactgctgctcaggaacctatcgaaagtacattcagccctccgaatctggggttctgcatccatggattcaaccagcagactgaaaatattcaagacaaaaaaataaaagataactattacaaataaaataatagagtataacaactatttacatcgcatttactttgaattaggaattacaagtaatttagagaggatttagagtacccgagaggtatgcatccctggattttggtatctgcgggttttgatacaggggtgacctggaaccaatcgccccatgcacgctgccaggtgatgactgtaaatggtcctctgaatcagtgactcgctgagggaatcaggaagaacaatcttacctttctgctcaagctcaggctcacagtttaatcttttaacctccctctgcatcagtctaagtttcaaataataatggtaatttatttcctctgttattaaaaaacaagaccaaaaaaaccacaaacaaaaccctatcaagactggtggggtatgacctgtatatttttagcttctgaaatttgtcctattactatttaaaattaaaagaatacatttttctatttataaatatatttaagactgccaaatgatagctgttccttacccaacattagttataaagaaaaaaagcaattccaaacaaaaatgatattgcaacaaaaacatgatatatgtattttgtgaaagaagtacagctgcctcagagacaatgagaggctatgaaaataaaggaaaaccatctgagctctggttagagactctggaagtagtgagcacaaatttctttgaaagaaaaagaagaggagtctgatgtaggtagacaatccaattctagttactgtctttatttgtgatagtccatagtctaaaaaggtgcaaatactattaactagcctgaggacaaggtggcaactgcatttcattctgaaatggaaaaatccaaggaaggtagaagaaacaattgcatgagaattattactcaattatttttcctcaaaaagctgtgtatcttcttttttgaactttgggaaagcatatataagagtttctttgaccccgaatagtccatgtatttacccagaaatatttgtgtatcttgctactgcagcaggattacaaaatagattacaactctactgtagaaagaaaatatgtttttatataatctgtaacttatctgggtagctagaaaacatacacacacacacacacacacacacacacacacacacacacacacacacactacattttaatcctggcatctcagtcaactcccatatctgagtggttctttcaaataatgcttctgagtctacaactttacctttccttctctaagaagtgtcagggcatatggctggaggaacttagtatatagacctagatagagctcagggttttggggaccagttatgaaggggctgagggatctataggccacttcctttgataaacctctgtaccagctcttttcttcccaaaatttccccaagtaacaaggtttagtttagttttttttttttttaagcttcttactcataagcttctttcatggcaaaccctgatatttttttcctaggtagaaaattatttggatttatccatctaattctctgatacagtaaaagatagctataaacttttagcaaaatttatctctatgaagattttagactttgaagcttaactgactaaatttttccaatacttgctctctattgtctgaagggtagacatttccttgcctttaagaggtggaaagccacaagggaacaagtccttaaagagatagtctaaaaagccctttctaatctacaccacctccagcaccaccaaaagtcttcaattttatccacatatttgtttctatgcgataaccgatatatttttgagttactttatttcccaaccccctctccgtcccaccccccaccgccaacaactagagtgcaaattccatgagatcagggtcttggctttttattattttttcattgcaggacctacctacaataattactggcacataggagccactcactaaatacttctagaatgaaagaaaataaaaatgtgatgcatccttacagtagattatccactgcaaattttggttgctagcaagcatgcatcttttgtgctactgcctcaaatgggccttctgctgcagacatacttatctattgacagttcttttgaaccaccattgctcttcatgttttcttgctttaaatcatgctgttgccgctgcctagaaggttcacttgtgaaccttcttgtctttcacactcctaaatttcctcaaaacataaatcaggtgtcctggtctccaaaagtatttcatgataaactttttctttctctaagtccctgtgctgacatataaccctcataccctatgctggccctaaacttgttctttctctacgtccctgtgctgacatataacccccataccctatgctggctcttaactcactctttatactattctctctgatggaaactcatggactttgttaagggaggcattgaaagcaggaactgtttgctatttctggcatcaaaagcaaaatgcctggtgcatgacaactattcataaacattgaataaatgaacaacaacccaccttatttctctctcatggtactactctttattgttttaaacttctatagttatcctggggaaatatgagagtaatgagttttcttgaaagtcaggtgcagggacatttatggcaatacttgtcttgaagatcaactacatcaaagtttcaagactaactagaataattctcaaggagaaggaaagaggcattcaagcttattttggagtagtaaataacagtgattctggtgtccaaactgtcacaaagacaaccactgccatattaagcttctaatactaagaaaagtgtcaggtatacggtagtagatcctgatgaaactcttcagaaactgtttctgcactttacctcatctggcagctcttggtgtgcgctgaggtaatatattaaatttgtggtgtaattagtttagaaattattcccctagggaacaaagatggtcaagagacaaagcttgatctaaagttgacagcctgggagacaggccgaatttggaggtgttaccgtagcatatgtggcttagtattgaataggtcaaaatattaatgacccatcctacacacaacccagggaaaaatgactgggcattgtgagagagtgtgggtgtcttggcagaaaggtattacatctgtttcttccacatctatgagtgaattatgcatgctatgacaaggaggcttttttaaatatgagaaatttgaggcaaaaatgatagaccaaaaaagtgcagagaaacaaggtgagtaatgaaaggcagaagtggtatattggcaggcctggaaatcagctgtgagtaatttgagttaattaaatgtggcataaaacatttggaggaaaaggttgatgagatccaattaatgggcaaaagaaataattttctgaacagtaacatttgggctatatcaaagataaaagtggtatgtgataagagattgagaaaatgaacatgataattcttttgtcacatgaggaaatctgaggtgaggctgagaaccctgtctcgatgtaaggaagaaatcatcttcaggaaatggcagttgcataaaacaaaaagggagactcaggggtataagcaagtggattaaaaacttgtctgatttattcataaatgatctgactccatttacttctgtttctcagatttcttgggaattgataagtatattttctccatagtacttcttgagatgtagaacatctaacatcaatactgattattgagttttgttgtttttctctaactcagagatttttattttaaagcagcagtaagcaatctataattcacagcagtaaactataatctacaagccaaacccattcttagctaagaatgctttttacatttttaaaaggtaaaaaaaggaaaaaaaatgaagaatatgtgattatgtagtccacaaggacaaaaatatttattacctgcagtgcttaaatttaaagggtaaaattaattaaagaaatcctcacattagaattacatgtaatataattatatgtaataaacctaattatattacatataatgcatgatcctctacgaatttaatttgaatgtgaagatttctctaattgcatatatataaacatacacctacagttttatgtgagagaacaattctgtcttacacattatatgatttcacacctttgaggatagattgctagataaaagagataggaaaaaatatttagcagtttcatagttcattggggtcaagaagaaagaggagtgtggcaagttcattttcttcttacaattacaacatcagagaagaaatgaagtaaaaaaaaaaaaaagtgaatcagaagcctgattgtaggagatgcatggagagaatgaataaggcaataaaagggtgtaacttgcttccctacgagttctaatgctaggaggaaaacgaaaaataaaaatataggtctcgagggtgccagctccactgcccccctgctacccctgcccctagcaagtattagggagggtaagaactctatctgctaagcttttgctgtcttctcaaaagagatattgtatagatagtccctcaaatagacataaatatatatccacatctattttggatggtagtatttagcttcttatgattgtgtgtataaagcacttcaagcatgctgctcctagtcaaatccctgcagggccaaacaaattggggcagttcaaagccaagagagatgggagaggctgtgacatactgggaatagattgtgctcttcctaaaaggattaaaattatattaaattaacagcaaagaatataaagcagtcagaagtcaccagttgcaactcctgctctttttcctgtgaaccgttcccctttttcaggtagagggacagagggggtggggcagggacttctttcagttgttactttctggttttccttttttcgcaaattttttttttttagacattctgtatgtgttcataaaagtcacacatatgtatactctaattacaatgattccatctacaaaaatctgtattacatataattattacattttataattattacatttgagaaaaattagttttcttcccaaaggaggcctatataactttaatctattaaaataaaattaattttgaatagcacattaaccagatgttttgctaagctatttctggataattccaaactaaattggcaaattttatttatttttaattgacaaaattatatatatacaaggtacatttacaaaattttaaaacagttgttaccttcttgaaactatttattctaattttattctaattcaattcagcccaacctcaacatctctgcatttcccctatgaatccatctactatcatcgtctactctccaaattcttcctgataaataatattcttatattttttaagcagttaaatttataccacttactatttatcagtggcatttaactctcacaagtattatccacattttacaaataaaagttgcacagttggcaagtggcaatctagaattcagacccaaaggcttcaacccaatgggtcatgctcttaatcatgaagctaaacccacctcaaagaagtatgagggaaatgaaaggcagatactggatcccatatatacaacagctgtcaggtggaaatatctgacagaaatgtatttccactgaactcttttatttctctaaccattgaattaagcaatagcacatccttattaaacatgatctctctttaaacttttgattatttcataaatttacatatatatagtaatgtgaacttttgttaaaacattgcaaaatatcagttgaattgtatttcaaataaatatatcactttcctcaatgttgacttaatgtgcactactgttcatatttttctggatagtccacaattattcaaatggtaattaaagtgtcaaaaccatgtttcaacacttgtttttatgtccatgctcctaacaaaacagccctctttgttcttcacattttctggcttcttcagctcaactgaaatttggatttctcttttttttttttttttttagattccctctaccatctccaacagaaggttagctttctctttcaagagtataagaggcaggggctgggtgtggtggttcagacctgtaatcccaacactttgggagaccaaggtgggtggattacttgagcccaggagttcaagaccagcctggacaccatagtaagaccctatctctacaaaaaatatattttaaaaaatcagctgggcatggtggtgtgcatctgtagtcccgtctactcaagatgattgcttgagcctgaaagatagaagatgcagtgagccatgatggcaccactgcacttcagcctaggctacagagcaagaccctgtctcaaaaaatacagtaagaagagccatgccactccttgtatttatgccactttgtttttgcttctactaccatactgcactgccctagtttgaacttaatgttaggaagtactatggccctctctctgttcaggccacttcctattcaccccagaaccagtgtccatttgtagtcaactacagttcaccaagctttctattatttctttagctccagcacctatattcatctatctcataacttcatatgtcatccacatctcaaaattcaaacttctaaactccactgcaacaataagagatcaaatgagcttatgtgaggtgatcagaaattaagatattgtaaacgtcagaaatgtaaaaggccaaccactatctgttctgcaaattaatatattgttaatactaaaatttgtagtcccagcatatgtttgctttttttccagaatttgctgtatctctatcatatgctaggcactgattatttggtttcatttttcttcctattaaatagtgacaattttttttaatttgttttccagacagaatgacagcttgacaaaaagatgttgtggtgtgtaccaaataccaagatgcccctcctacctgtactctcttttgtattcccagtcataccaccatagtttagattctattttttatttcaacttttacaaaagtgtcttatctccttcctgtctcgtatccatctgaagatgaagagtgttgggctcttccttcaggggaaggctgtcaccacctgctgaattatgcccaagatttcagcagcgagaacttcctccttcagaaatgaagagaaccaacacaggaagtagcatgaagatgtgccatagaattaaagcaaggtgatgcttaatgaatctttcagtgccctctcagaaatgtacacgcaaatatacgtgtgcccaagattttcagtgtaatttcaaagggattctcagaactctacatgccttgaacactgaggtcagaaccctggttccagatattttaagatttgcttttaaataatgcaacccagagagctgtgtgcttggatcaaattgttcagattccttgtagcattgcttctaagtgtcccaccctatgcctttgacttgcattaatgggcaaattgtaagtttcttttctgtcttttgacagaggtcatcatccatcatatccttcgtatgtggtctgtataaatgcacacaatgtcttacatattatttcaccaggctaacagatacctggagtacaaactaaagtttcagggactccaggctagcaatcttctaaaaggaataaactagcttttataaaacagaccttatttttctcatactctgttttttctagttattctcttattttcccatcaattctttaatgtttcaactatatcatatgtactgaagtgaaataatgcaacatcctttgttcacacctaaacccaggcattaacgtggaggcctagaggctggtatggtggtgccagtgataatcaaaacgagaattcctaaatggatgcagttttcctccgtcacctacctggagattgttttccaatgctaaaatcaggccagtttcaattttgctttaactaagagaattggtgttttctttcattgttactttgttttctctaaaattacgatgtcgtgttgctgcccattgaatatatccagagtatactccgtatcctggcacttcaggcatttctactgttccaacctatggctgcagctccgttatttccaatttccctaatcataggcctgtgctgctgtcgaactccacaagtctcctttcaagcactgggaagtttctgatctttgtggcacttttcatgctattaactatgccaggaatttgatgttctcacatgcaatgcatattaaaacccatttactataatatacttatatagctaataaatcagacaaaaattattaaatgacacttaaggattgctatgctgttatacaatgtagatgtatactaccttctacctcgtggcaaacaagtgccttcatgtttttgctccaacttacttcaacagcctcatgtcttctaacacttaactttaaattctgtgttctcacagtacttgaaatttcaatgtgctttgctctatattttctaggccattgcatgtggtactctctttgcctgaagttctctttttcctccatacttcacctgcccaccaccctttctccctgtaatgggccacaatctactttgggaaaggctggtttctgtccttctcatgggttcacctaacatcctattctgaatcatattccagcacactatattttgaaattccctgtttgttgtcttattgcactgtttccagtgcctacactgcacctagcacatggaaaacacttgagtgaatgttgctgacattgaaatataggtattactggttttgaagagctatttgataaaagtaattgaaagccataaaaatacttttcatctattaatccaggaatcaaaaacttaaatgctttcagaggtcaggcaggtcatgtaaatgtccagtgtagtacagaagataacaacagagagtacagactaatgtacgtaccttatctaaacacattcagattcacatttttataattactgtccaagccaaacaaattataaccccgtcttcaaataatttcttagaaggaaaaaaagatatatttattaaaatgttacctgcagatttatttgtaataaggaaaaagtaaatacacattaaatagccagtaatagaggcctgattaaatatggattatatccattatatgtcatatattctttattattaaagaatctcccaaacggtaatatatggaaaatgctttcactattggaaataataaagaaaaaagctaaattacatgctttctataattgcaactaagtaaacatatgcttccttattaaaatgaaaagaaaggattatgcaaaatgaaaatacctataatagggtgctcaaaatagaaatgatttttttaaaaattcaacatttagtaatgcttttgtttttccaaccccagtctttggagaaaatgttgggactatcttttggaatcttagaatttgacacctagcaagcaaaatcatgttactttgggtaagagctgaagaatatcagttgtgggctgagatagaaataccattgtcatggcaaccaccaaaaatttcatagaaaaggcatagcttggattttttttaatggagatgactaacaagattgcttttgaaatagttctgatatagtgtgggataatatacagtaactccgataaacagttttgctggaaaattgagataaagtggcataaccttaagatcagaacttagaatccctagtgtaagcttagcatattttgtatactaattagcttttactgacataatactaatatgataccagtctgtcttccctgaatacaaaaattacatatttagtaacattataattctataatgataataattctcatcaataaaagagcttgggttttcttgtcaagggagatttaaagtatttttctgattctttatgaagactcaattatgtgttttcactgttcctctatgatactatatataacctactggaaacagaagcttgtggaaatactgatagcatcaatagaaatcatcgtgactccttccttggaaagggcatgtttcatcagtaccgtttgcctcatttattaagctgaattgtcatcttaagtgacagatattttcaatgtccaaacttcctgcaaagatttatgtattttatcccattctgtttgaatttagatcaagaatgctcattagattattttgtgagcccaggtttgctagagtttacaaaatctgacctagctcactagccacagagaggctatcttcatacaatgaaggtttcctgaagagtgaatgaaatccatggctttgtcgaatacatcaactaatacattgaaactgctaattgtgtgattgtcctggggacatgactagtttatttggaaactacttgtaaaatctgctttgccttgcaaaattgcttcccctgagaaattgcttcttcaatggcatatccagtggagacctttcggtatcttgcacaattagtcagcctagatataggaccatatagttaagaaggaagagacagacggtcagtaattacaattttaaattataattacaaaattgtaattattttaagggtgaaattctaattggcattttttgtttcatgtaaacttctgtagagctgcatttatcataaatagccacatatccaaagtatcacatttctcatgtcacatacaaacttttgactctagcattcaatgtaacgttaaaaaaaatcaaatcctattacctcaaaataagggctgtgtgccaggattgggaagcattacaaaatgagttaaaattaaatgagatgtggagcggagtttgaaacccatgccgttaaaacctcataactgaaattggcacctgattgtttttcattcagctctcgaaccagttaaatagatgccataaatatgttgattcttgtaacccgtttagtctatttattgttttctgaagccaccagtaaaactagtctttttcaccagctactgaagacagaggtcatgttataaatcaaatggaattattaacttctgtttccatttttaagcatttgaccacaaaattaaaccttgtatttctacataaaaatccaagcattataatgtgaatgagatctgtccactcattcattcaacacccacttactaaaatgctatttcaaagactattctaataagttaaaaactgtttgaggatcttactgtctagttagtcatacagttaatcatcacaaatactgaaggtttgaatcagaaaagaaaaaagagaaaaaacaaaaacagttttgtttttttttgtttgtttgtttttttgtgattggagtctcgctctgtcgccaggctggagtgcaatggcaacatctcggctcaatgcaacctctgcctcccaggttcaagcaactctcctgcctcagcctcccaagtagctgggattataggcgccaccacacccggctaatttttgtttttttattagagacggggtttcaccatattagccaagatggtcttgatctcttgacctcgtgatccacccacctcagcctcccaaagtgctgggattacaggcgtgagccaccgcacctggccttaccagtatttttaaaatgttgcacacaaatagccataaatagcacaggggtaggactttttccattgaaaaatatatgacttctctataattaatttatatatcttaaccacttatgttacaaatgaggaaaatataaatctaccaaaatcattctgtaaaaccattcctgctttgagtcatatgaatacttgttgctaatttgaggctttctaaatttaaagacataagatgagtagttaatgactttgaaatttaattaggaaagtggtgactgagagaggactagacagtatgttgtttgcactaatttgatttatataacccttttctagtcaaccttttaaaaatcagccagagagtagaaattctccaccttcaaaaattaggaggtttactaatttttgaatctgggtgaagtttcccagattaatccaaatgcaactaaaatgtgatgaaagatgaagctcatcttagttttcttaatctacatgacctactttgtccagttacttaaattcagaattttcatgttcacagtttgaaccaggagaagtacctctctaggttcacttttctctgaaattctaagactaaataaaatattaataaaatgtctcaataattatctcacaaatatattaagataaatagtatgaaataagttttaaaaaatattagaataacagtattattagaaaatatatcttaaaagggattaaactacacagatataaggtttgatgtattttcttaaaagatgagaacttactaccagaaacatgtagtatattaatagcctcattatggaggtgagattctctctttagcagaacacaattagggaatatgtgagtgatgttttattttttatacattgccttattatgcatttccagtcatgatctcctagtgtaattgcatttaaattgtgttcttaaccatatgttaattaaataaactcaatgtaaagacccaatctaactttccttagtaatgtggagttaataaaaactgcagctcattggaatctagagtattacaggatctttgcatacctagctcttaaactgatttgttttggattccggaaaacttagcaccttggttaagtggcttgtgaagaaattttgatacatacatccacctcacgtagatctaatagctatgtgtttggaaagtattttgtggaaacaaagaattaaacagcaaggaaatttggttttccttaagaacactgaatcgtatagagataggataatttctggagacaaataggcctgtcaataaaggtcaaatatatgcaactccctccttttgctgaaaatctgttattccatgttgacttagatattaagagaatactatactttccaataattatattgttataatgcaggggatatagttcccaccagtgactctacatctacaatatatgatgaaataaaagatataattataaaatatcatactatcatactcaattcattgagataataaagtacattctaaaccttatttaatggacaaatacatgcactatcaggtggttacatgaatctccattatatttgaaaaaggtatatgtgttgacattaaaaccacatttctacggtgtcttaaattataactacacaaaattaacacactaactctgtcacttatttacaccaataaaagtctgtttccaaacaagaaagctgcactgggtatatgtatatgggtgtttatgtgatttagatgactggcatatttttaaaaactgtccaaaggagtttgaagtcataattttaatgtagcaggaaaagataaagtcattctcccatatttccttaatgttcagatgctatgtgttgtatgacatgatgtatataatgtaagttactaaaactttttttggaagagaaaaagctagagtagcagatatgcacactaaaaggcaaaaatctggttttacaagttttataataaaaaaggtggcaagatgaacgtttttttaacttagaactaaatttaagcttaacttttacagcaatctttagaaaattttgctatatggtctttcttgaagattatttgtaattttgtataattgatttagaaattcccatcaaattttaaaattcagagttctagataaaaccatcaattatctgaaatcctttctcagtcaagactgcccatgaagccaagtgccttatttgatcctataagcttcactgaaaatcagcagagtctttattaatttataaatgatgggcatgattaactggtctcaagtttgctcacaattctgaacccttgaaatcactgaaataccaaaaaaaaaaaaaaaaagtaagaataaagctattaggaaaagcgattacttgagcctactcagagtctcagtgaaacaaaggtccattttgtgcataagtgtaaagaaatatatttttgaaaaaattgtatttacaattagaaaatgaactctgaggtttcatttattgctagtcaaagagtttagagccattgtaaatagtttcctctagaccgtaatacaatgagtttattttagtcagcaattacaatgacaaaatgctaggtatcattgagtagaacattaggcaaagatccgtttcttcctcttgtataaaatctgaatgcattctattaaagaacagaattaaacaggcaagcaaagatgtattcaagactatttcaataggggagaaagactgaactcaattctgctgaaataaaagggaggcaagtttttaaatgatgctgtgagctagtgaaaaatactggaggatattagggtagagtttgtcaatgtgattagacatttgtgtttgctaatgggtgcttagccaagttagggtcctatccttcgtgcagtttgggaaataggaacattattatctttcttgattattacatttcaaaaagatggttcccaggtctatcagaaagacattcttgggttgtaaaatatttacagctcaaagagtcagagaaagaatttacaattccaagttttctaaagtaagtgatcttgaaaaagggtggttagaggcctagggtcccagaaggaagaaacctgccggcagttcatcaagctaagtgggaactttaaggctgtcttgatcaatccaaacctggaacacagattcagatctgattgccaatgcaagaaaaaagcttgaaaagacagacactcccctgatcacccatcctcccttatctgagttaaatatttcatttatttatgtttttttaattttttcataggtttttgggagaacatgtggtatttggttacatgagtatattctttagtggtgatttgtgagattttggtgcacccattacccaagcagtatacgctgaacccaatttgtagccttttatccttcacccccttcccaccctttctccctcaagaccccaaagttcattgtatcattcttatgcctttgcatcctcatagcttagctcccacttatgcgtgagaacatacgatgtttggtttatgtgttactatggaggcacaggattgccaatgtcacagattttatctggatgaattgcaagtttttgtctgtttattactcttgacaagagactatgaagtttatgagggcaagaatcttgtgtgtttgtaatctcaggatttacagtaatgcccctcacctcatagtaattcaattaatacttgactgaattttaaagatttcagagaataagataagaaataaggatatgggaataagagtgtggatattacaaaagaagagtctttagtttggtaatatgaatgctataaaggaatatgatcagagacatgttcctggaggtatgaactgttctagtaaatcctagacaactaaaagtgggccatacccagtgaagataggaaaaggagcttatgtctaatgtatggtatatggtagacaccatgttagcatatctaaatagtccttcgtctggaagaaaagtattacaggctccacttcataagtgcagaaactgacagagtagccatatagctacactcaccctcacctctgttgcccagttataaagccattagactttgttgctgtaaacttaaactgtaatcgtttaatttttagagaatagaagaaacagaacttttaactttacatattagatgacacccccaagaaaggatcatccacaaaataaaaatagaatctatgcagtattagatatatatttaaatgctagagacagggaaggataaaaatggctaatgttttggggtaccttccaaaacatctgaagggagtgtcaacacaaggagaatctgtttcttggcagaaccttcagcaattaaattctggtttggatggtcattgagatggaagttagtggggctcttcccggtatttaaaacattctctgtgattctttgctaatgaaatatctctgtttccttggttttattatcactggaaagacgtttaagggaacaatctttctgtgtttttcagatgtgcattgagaatgctgtttaactcctattatgtgctggagaggtattgatagttcctgtatatgtctctgtatgtcaggacaagaaatattaaagctgcttggtgccattcctatctggttaaaaaaaattataaaggaagatattcctgaattgaagggagatgtctggaacaagagcaagcaaagtggagagaatttaattaacaatttagttcaatctgaaagtcccataaaattcaaatacccatgttgggctgatatgatacttattttcaaaacaatatggcttgaaactttttctaaagaatttgtggtgagaaaaaaaactaatggtaatctactgaataaaagaaatatctatttttctaacaattctttgaaatccttgacttgtcatttgaccgattttaccattttcttaaaaaaaaaaaaaaaaaggaagttgcatactggaaggaaggaagacttagtgcttttctggtgcactgttggcattcttccaattcttctggaaaacatcattctatcatttatgctcccgtgagtcaaaatgaaaaagtctgtatagcctcttagacagaagtatcaggatattcttaaaggggccttatccaaacaggcatatttaaaatagttattagtttatcattaagccctaacaagactgcaaagttgcttagcaacagaatcaggcacccttaacaggaacatgcatgggaacaatggtgaaacataattgagccttaaaaaggcaaattctttgaattaaatcgtgaaaagacaatgtgtcatgggaagaatgagtattttaacctaagacttgttctctaagcattattttatagctagacctaagtgtctttccatagaataaataatgatacttttagtctttatataatttaaggcacttaaaaaagattgtttatccaagttagctcaacaatgcataatatctctattttgacccattaattatcttcaacattgtagagatacataaagaaaggaaggctcttacaaaaataaacactacaaaatatttgatgactgcaagggtttaattttgatgttatgtataatttaaactatcagaaactcaaaaactgtacttttattttttaaatttgaatatacatttacatatacacacataacgtatctaattcccatttgcaggaaaaaaaaaaaaaaaagcctgaaaagcactgtctcttttagagttcttttgactagtttgacattggctgactttatactccagtacccgtaaaagcactgtcttgcttcatttagtaataatggaaacaaatctggtgcatgtgggctgtcttgatataatgcataaacacctaaaaagttcagtcagggaataaactcagggtcccgtctgtggaggcagagaatcccggcttggatcctagtcctatttctggctttatcaaatcacttacccactctagacctcatactcctcatctataaaataagacttctaagatcccttcacatctaataattctatgtccatcaactcttaagtggtgtcattctttttttctcatagaagaattgtttgttttattgaattggttatttgactgctgtctcttatgtaaatactagaagtagtaggcctatttaccaacactgttagaatattaggcagaaaaaattccctactggcttctttttggctttcctttatgtctgattatatgttgcactgccaatttttggtccctgaaagctgaaaacgtgcagatgcagacagatgtaatatgccgcagctttttgtatcaagccactctattttaaaacaactggattttttttttttttttgcagtctttggaagagggttagatgaccaaatctattttccttttcttcagagttttataacaccacaaaaggtcatccttaaacagtcagataagattaacaacaaaatcttggaaaacagccagtgcatcaacaaaacaaacccagtggactgtttataaatgttaagtttaaacaggcagcagaacacgggatggggaggagaggagagatacttcatagacatagcaaagaaataatttccagagatgacccatgacactgcagtgttgggaaccaatatcaacaaacaaacttgacacccagcaatatgtagagtgcatttataaagatgttagaaggagcaagtcgtagatcacaagtcacagaagcagaatcatgggccattcccatactgggttcttcatgccatttttaatgaaaagataaattggtggaaatattttaattgcaaagaagtgaaaaagtgatttttaatgccaccagttgacgccaggccagggttttcactatgcaacctagcatgtagccctaaagtcctgacagctaaatagtagggaagacactgttctcttccttgcaaataccacttcctttactaaggattctaaaggaagagaaagcttttaacagagaacacctgagaggaaagccaccaatatttaaatccaggaacttaatattgacctaaggagcaagtaggcttaggtaaagggcaagctaagaaattgttgaaggccttgcacatttagttaaaatttttaaaattctgaatagaaatagagaattccctgcaaattgtattttatccatgattcagatgtggcctgttagaagtttaccaggatgaaaagtaagctgctgaggattgcagatgatactaatacagacataataacaagcagagactgatatttgtaacaaaggatttcaccagctttctaagaaaggctttcatggttgacacaagaattagattgtagttatacctgatatgaattttagattatgcaatacataaagatgcatttaggagacattctcaataaattgcacatcatatattgcagtagtaaatgttacattcttttcaatgaataactttacagtattttgtggtttaaagagactagtttaaaaataaaagattgttttaaatttgagaaatgagcaagttaaaataagatgaaccagatttctacaatccactttctgatgctcaaagtggagagggtacaaaatggtgcatgactgagtctatggcaatctgcgttttctgcactgtgtgaatcatattatacattctgtaatatgaaggggtacaaggcacttacaggttgcatttttcaaacttttacaaaggaatagtagtcaccttcagagacttctcttctaactaattagaccttagacaaacatatatttgcataagtttcatcaagctgcactttctgaatttctttctcccttgagtctatttattactcaattcactctgttatctaataccccttacagtaactgtatgccctgaaattctcttccctcctccacatcatcaaaacttgcttttggatcattcagactgaggtaaaaaaaaaatgactaagatcttaaagtacagatatttgaatttcaatagaaaagaaaggctaaaggattgaggttctcaggcaaagagacaagagtctgctaggcatcagaactttttggcttctcccagttacaagactcatcttataagccatatagttggagagaagtagtcattcaaaaggctcaaaatataggaaaacaaaaataaaaatcacttcttagttcataaatacaatgtaggtctattgaagagaacattaaaattgatccctgttttctgatctcaaactggccaacagtgagaaggagttggataaagcagccttggtgttggtgaatgcaagaagaattgagtgtataattacaaaaggaaagtgagtgtcaatgtgtgtgtgtgagagagtgtttgtatagaaaccactctagaaaaagacatttaaaactgctaaagttattaatgcactgaaaagaaactattaacttcaaaatcattctattgctatattaagtcatatttgagggacaaatcaatagcaatgactttcttgaaatgtctcccaacactatgattttgttttatggcactggtgggtaaaggggtttggtctgaaaggacacaaacaggtaatactatcagttaagaatgttggcagtagttgagcaaaaaaataaaatatgatagaaagcacagtttgtttcctttgtcctttccttttatgtttagcagttatgtaaattaaaagaaattgatcttactacctattctttttattcagttaccaaaagaacatttgctttgaatgaatatggatgcatttttcttttaacagaatcaggcagccaaacatgactcactgttatttacatgagtcagtatctacttgcccatgtaatcttgtttcactaactttacagtcagatcattcttgttacgatcagggaaaatgcaagcaagaataaatgtgatgccaattaatacaactacgaattagtatttagtagtagttattgatcattttatatgggaagtaaaaaaatcaattatctaacattccattgtttactattatttttaacaaaaatgggattttgtttttttttacacaatgttctgttctttgttaagaagtgaggaaaaaagcacttactgatcctaagcaagtcagctcctcgatttgcctgatgacgatgaatatgaatacaggctttctctccagtacagttgctcttcatcaaaaacaggctggctctaacatatttcacaaacacagaaaagtgtgccaagacacagtcagcaattctttttaatttttgagatttaaaatattactgaactttgtttgagttttacatttctcatggataattttactgtgaaatttatgatgctataaaactatgtttatgaagatactatagtaggtttcacatatctccatatcttatattggtaacatttaaatttgaatactacatctttatcctttcataaactagaagataattgttctgatgactagcagaagaagctggcaggaacgatagatttgccactctttgctttctgttatttgtgagtctaattactctagttggtcaattaatggcaacacatgacaaaatcttcctactaattgactctcactattttgttactgctgaagcttcctctaattttgtatgtgcatatgttaccctacttgtcatttttttcctcctaaccttccttatcagaaagcccatctcaccaacttcacagtcagataattcttgttatgatcaggaaaaaagcaaacaagaatgaatgtgacgccaattaatataattactaattagaagccacattttgagggcattaaaacagaagaagagtagaaatgataataacttggttttagggaagctgttaacatataaatagaacccaaaatggcaccactggtagttttccagggacttaatatttctgacacacactcaatttgtgcccatggataagacatactatattataggagaatcaaagagttacatatttggaaaaatcaggttaccaaaaagaataatgacattgtttaaacaataatgcattaaactttccttgtttattatgctagaagttgtatgagattatctgagtaaaagcatttcaattacttcagcattgtgggacatgaagtgtaaaagaactcagaacatgggaaaaaaaggaaaaagagaaaggaaatggctgaaagattaattacttggctgtcagctgctaggggagtttatttatgttctcttaatattcataaggctcttgtcaaaatggtattattaaatacccattttatagaaaagggactgaggctgttcaactgcagtttatttgatgggtatttatgcctgtgatggggacagctatgtcaggaacttcaattccagttaaagtgaaacctggcagagacatagttttgatccaaattttgacagtagtacaatgttgcttgtccttctccgggatggtagtctgtgtttccctgtaacattttgtctgatttgtttgtaccaactatttggttttgtaaatttatgtgacactttgttttaagctaattataaatgtaaattagactctaagatgtcttttttccactaactggttttgtagtagcaaaaatctgaaattacatgcaaaatgctgtttacagttgttttagtaaggggatgcagagcagtcagagtgagttgtcagattctcaaaacaaaatcaaattatctaatattttacattaaatcaggtaatgaataccgcttctggatccaaacattggtttaattatttataatctttgcagtgtccctaaaatatctattatctccaattaacactaaggaaactgaggcatagagaggtccaagtaagtggcagggatggaattcaaacccaggtcagtttcaggcttgaactccactaattctatacctttcactgcctctctcactgtaggtaattgtattagtctgttttcatgctgctgataaagatatacccgagtctgggaagaaaaagaggcttaattggacttacaattctacatggctggggaggcctcagaatcatggtgggaggcaaaaagcactcctttcatggcagcggcaagagacgatgaggaagaagcaaaagcggaaactcctgataaactcatcagatctcgtgagaggtactcactatcacgagaacagcacggcaagaccacccccttcccccccgcccgaccacgattcaattacctccacctgggtccctcctgtgacatgtgggaattctgggagatacaatttaagttgagatttggtggggacacagccaaaccatattaataatcaacaaatgttcacgtatttcctttacatcaggtggagtaaaagaacaggtgtgtgaaagaaacagaatcaatcattaagcgatacttaaaccagtgcagattagttttaatgtaaatgttataataataatgctagtcagcagttactggatattcatattatgttagaaactgtgcatttaatacattatgggtttgtttgtttgtttgtttgttttgagacggagccttgctctgttgcccaggctacagtgcaatggcgccatctcggctcactgcaacctccgcctcctgggttccagcgattctcctgcctcagcctcccgagtagctggaataacaggcatgcgccacaacgcctggctaatgtttgtatttttagtagagacagggtttcaccatgttggccagggtggtctcaaactcctgacctcaggtgatccacccgcctcggcctcccaaagtgctaggattacaggcataagccaccgtgcccagccctttatgggtatttttaaagttaaatctcacatatatactaccgactctaggaagtagctaaggtgatcaaaacatcaacatgatcagcaattaagtggaaaggggttcctgggggatggttttgaccaagacattaaggagagaagggatgggcagtggtgggaagactgagaagctatttatagcagggagatagcactaagcatgcattgcttgcttaagaactgtggaccctgataacctaaaaagtgtggttttgatgaaaactgaagagttatacctttatgcagtttaaaaataatagactgatatctatccatcccttcatgtttgaacataactggtttggagatgtgttgaaatgactgatctcaagttctctttcaaatctgaactaaatgtctgtgtgatggagatagaggctatggagctgctttcccgagctcattgatacagccccctcactttcgccagtgttttacattctggcaaaccagcatagttctttttatctgtagttattatacatctagttgagaaaacccagtttgatctatttataccaaagtacaaatgaaatctgaattcatctgattagttcttcctgtaaaattgtgttcatttctatcacatatgttgtaacataaagatttttggtgatatcctagtcccaaagtgataacctagatcatctgactctacattctccataggaataaatcatacgaatctctctgaagtaatgttataattaattcctaaaggtaatttataattatatatatgctactttcatgcatatttgatatcattttgactttcactattcatttatcatgtttgcaagccttttgttaaaaatagctggtacacaaatcatttcctgattgccacatctggaaccctgattatatttgcatttcacagtcgttagcctttaaaactagagcagaatctgggaatttgcagacaaaacagtgcttccttctggcagttgcataaaaagacatttttaaatctgcatttctgtttaaagaaaactgatttattttcattctaaatttatataacactttctttaaactaatcataaaatgtaaattaggttaactctaagctttttccccaccagaacaaatgacagtaacattttgtacaaaaagaaaacgtttttctattcacaccttgaatcattgctctccctgtctttgaaagttaattctgattaagatgtactggtagctcattgaaatctttgacaaagccagcttagctattctcttgagtaatgatttaccttacattaaaatatcttaaacatatgaacattaataactaaagtgatgaatattactaatattgggactcaattcatcaaggagaatactttggggaagcagatggactgtgaagggacagggataatttttaactatggccttgatatttagaccaatggccgaggaaaaccatgaagaacatgagaatgggcttcattcatgtcaaggaagcagagtatttgctgatggcttaacatttactgggcatgtcctaacaggatagcctgaaaagatacataacattttatctgagtcatttaatttaaccacatccctctgtgttagtgttatctctattggtagatagaaaccaggctcaggaagattaagaatgttacctaattctagtaagctgcaaaacctaaactgatttaattccagagcaaagatctttctaccttatcagcatgggtctttacctctttgagaatatatgagctctatgagccttcttccagaaaaatccataaataaacaacatgagacgtggtatatcagtacaaatctcactaaatgattagtgtgtttggacttgcatctgctggtagatcttttgcgaatttgccttcctctgagatagggggctttaagtattttttctgaagacactcccaaattatacatataagaaactattttcctttcaggctaaagataaattaaaatgtatttaactacatataggtgccactgttggtctaacactctacatataccaggatacaagctaagatgggttcaaaaactgtccattatactgtaatttgtttctgatatcgtgacacagatataatttaatcaattataagacaagaaaaaagacagaaatgctccttcttcctcctcaacatcatgtaattagcctaccccactgctctaggctaggccaagtttttttgtttttttttttctcctagtacaggaagcatattttagtgactctctgtcacaatcttctccacttcaagtacatctcacataaatctagcctgtcccacaaagtttgtgccaggcagtcttagggtcagttgtacccacgtatgtatgattttgaacttctcaagtagggccattgtagtcagtagagcacagtggttggtactgatgtcaaactttctgagtccaaatactgcttccatctctgactagctatgtaaccttagataaatcacttaatgttttgaaaagcatctgttttctcaggaaaagaggataataaatacacctacctcacagggttaatgtgtaaattcatgtaacatgggataatgcacgttaagcattgcacagtacctgcctcttgttagtaatagctgctctattattaattatcctctttgtatccccattctcagctcccttctaacatataatagttcttcagcaaatatttactggcttgaattagttctaaaacttaggcaatgcaccaacagcagagtaatcacccttaaccatcacttctcccactgaaagggagaatagacagaagccaactatctaccctttttctacataaaacctcttatcgagcctccagttaataaaataatagttctgaaaccccaaaaaatattagcaattgttgaaatcatgctagtttgaaaatagttgagttttcctaacaaaatatgtctcaggatcccagggtcaccaagcttatattaatatagtctagttgggactaatggtaatcatcagtgaactagtcattttttagcttcttgggctcttaaaaaatttgttatcattaagcccacacttcatagagtcacagctattttatttttataggagactcaacagtcaaagtaatctctttaaaaccacaaagcatatgatacatttgtcctgcttaaaacttctaatggttatctagtgcaaagacactaaaacataaaccacttaataagacttataggcctcaagtgctctggcccccttcagtatctcttccagaccttcatgggttccaggcatgtttgcctttttcaagtcctgggatgcagcaagcttgtagctatcacgtggctttgcatttactgatccttctgcttagatcagtttccctctaatcatttcagtgtcatttcagatgccaactctactaccttggccagagagaccagcctgctctgtgtctgtctatcccattaaccagtttcacttgtcaatttgtttacttatgtactctaccaccctcccccaccccactcccaacaactagggcatttgcttaagagcaaggactttgtgttcattcaccaccaaatcttccaaggctttcaacagagactggtatctggtagatgctcaggaaatgagtgttgaattaatgaatgaatatgtgaaggaatgaaaaaaaaatgagagacactatgaaaaaaatatttctcttttgaaagaataatgtaacaaggaaaaaatcttcattcaattaaaatcaatcatacatcgttactaacatcacttagtaattcacatgcaatacaaaatttttctctactttctggttctatccatgtaattaattaaattttgctgactctaaggccaatctgtgagacattatttaacttccttactctaaaatttcagcattaacttggcaagaggcatcatcaattagtggtcatctgatcttgcataaattataattaacctttcaatgcctcagttttctcatttgtagtgtgggaattatacaagatgtataagtttataagaataatcacattaataaagctcttagaatagtgtcttgcatctgccaaacaatatagaagtcttgactactgttactagtattattattatgagaattaaatgtggagaataatccttcatacagttgtatattccactgaatgtaaatggaactaacaaaatatttagaaatcagattaaaggtggggtggtaaaatataccaaggtagaagattatgagggtataaaagcataacagtatttttgtcttttgttttactttatttttaaaagaaggaaagagtctagaaataaaaagacaaaaactctccattggctgtggtgaaatggagatcaccggtgtccttcataagtgaaatttcagagcagtggacaaaggtgttggagtgagggaagccagaagaaagtaaactattgagtaaataggacatgaggtgtggaaaaaaaatctataaagataacaattttgagaaggacagatgtgaatgagacaaagaagatattggatgaccaaggaaggtttcatgttgcatatatactttttactattttaaataggagttagtggtctagaatatgtttgaatttttatggaataatctataaggagtaggtcggctgtggaagactcagtgctgtgaagttcttgatcagatgagagaaaatggaataaccactacatacagtgtgaatggcctttcacattaactctaacaaaaagggaatacgaagatcactgaagatgctaatggataaatggatttgacagtgggccatttactggcttctattttcttaatgagatataaagcaacacatcagctgagagaaggaagtaaagaagaaagatgggaatttgaggaaagtggggaagccttatttaaaaaaaaagaaaaaagaaaaaaaagaatggcccttaagtagaatgagaaagaatttactggttagtcagagcagtattcccagtcttggaagcccatttgtggttggtgtttattaatttattggaatacagatgtgccctgtcacgtgatttttctccagctacctaggaataagttatgaagaggcagaaaagagtgagagaagacaattaagagaaaatacaattagtattttaaatatatatgtgatgttcaactttaatagttatcaaaaaatttaaagaaatggaacatgagggtccagttgattaatttatcaaaatcagtaatcacatatcacaatatcttattttggtaatgtacttcatctaatttggttcaacaacttgaaaagtaatttggcaatgtctagtaagataaaagtggtcatagctttttactcattaattttaattctggaaatttactaaaataatttatatttagaaaatcattatataaaggtgttcattgtcctgtcatgtgtaataacaaaaaaaatggaaacacatttaatttcaacaataagaaaatgattgagtaaagcaaattatatccaattagtagaaaattacagtcattaaaattataattatgagactatctagcaaaatagaataatgcttactgaagagagctgatttcaaatttgtcagccttgtgacaactatgtaaacatgactatttattaaaaatcaaacaaaaataaaaatttaaaagctctgcaacagtaatgggaatttttacttttgttttaaaatatttttagtatggttcttttttataattttgttctttaagaagaatgttaaaggagatttttttggcccctttttaaagactctctgattattacgtcttacattttcaaataaataattattttaccagaaaagatcagacttatttgactgattatacttccacattatttggcagaaaaataagaaatgtcacttataattgtttttagaaaaaatttcaagattttttttcttttttgctgtatttttcctggaatagagattaagcaaactgcctaaaattctagtcattatttttcattattttcatttttattcattatcctgcccttcacaggaacagtaatgaatctgcaggttgcatctgccaatttcttgtctcttatccacatgatgaagccatgctgatatgaacacatccactattttaaaaactcttcagttattgaattataatttggtcttctgttataaggattttatataagtgtaaaatttggactcaacttctggaagccttttgtcttcttagtctaaacctgaaagatccttaatattcacccatatgacaaataattatttgcatagttagaagctcctaaattatttattaaggatacctggcagtgctcttgctatttctcagtagccctttattgaagtttctctctccctctttctcttgtacctacatacacaaccctaaagtaattagggtttttttttatgaggattgccagtataatgtttatagtttcttttacaggaccagatacaaagcaggcactcacggcattgttagtaatgttatcacttttctgttattatttaggtcttcattttcctgactgtgagtttccataaggaaatacaatttccactacatagggtaacacctgttatctggagagattttaattgacctcattactcaaaagaaaaccccaaaaccaacagatcagttgcctgccttttgtgtttgccttacaccagtgttcgataaagatttaattatttaataagttctacttttcaagaaagtagaacaaattgatatggtaaaagagatgagaaaactgtccatggaaaaaaatgatcaactcacttatgtgctgaaagcccaccttaggagaactgctgttttgagaaacacaaaggaaacgtgtaaaaatgtattgagtaagttatagtaattatttttaagagctaagcacaaaatttcctgttgatttacatatttggtaccaacaaaaatcatatggaattagtcatattaagatacaaagttgagctacaaattcatagtctaatttatgaaacatgtctttgttggctgttaaaaagtaagatggtgagtgatctctgagtagcagaaggcaaagagaaaaatagccttttttacattatattatacttctgggtaaaatgtttcataaatctagctacaaagctatatgttctgtagcttttaggtacctgctgtttcaaagatttcccctgtggagattagattttgccaaggaagggatctgtaaaagtaatacaaatgccagtatcattggcaaccacgagtgccagcaaagtgagcctccaattcaaattgatgagcatactatcctgtagtatcttttccttgtgagttttctgttttggaaaaggtgggtagaaaatgtattttaaaaaggctttataggcagaaataacaatacatcattctgaaaacataaaatactttagctaaagttattacagcatcttacattaatatttcagcgtacattagacattgcctacaaccaatgtttatgataatcactgccctctgaagtggaatcatgcccgtggcaaacaataatcttaaagaagattaaacaccgaaaagacatttagcatttaaagacagtttgctttgatttattcagtgagttcttccaaaaacatgttaccaggaattattgcttattgaattggaattaccaaccattttagaattatttagtttttttcttcaacatcaatatcagtaaggtaaagcaaactcaaatatttattggggactgcagaaacacaaccataaaacaagaaaacacttgactttttaaatagactttatattttaaaacagttttaattcagaaaatttgaaagtatattatagagatttctcatacatactatacccatttttctctattattaacaacttatattagtatgttacatttgtttcaattagtgaacaaatattaatatattatcattaactgaagttcatactttgatcatggttcctatatttttaccttatcatgtcacatttgtgttccaagattccatcaggatactgtattacatttagttgtcatgttttcttaggatccccttagttgtgacaatttctcatactttccttatttttgaagaccttgacaattttggataatactggacaggtattttgtacgatgccccactgctaaaatgtgtcttatgcttttctcaagattgggagtgtgcttttgaggaagaccacagagataaagggccattttgtcaagatgacttatcactgctgatgtcaaccttgatcacctggctgagatagtcgtcatcatcaggtttcttcactctttctttctctttctgtattatactctggaaggaaatcactacgctcagccaacaataagaagcagagagttatactccgccttctttggtttgaatagctacagaagctatttggaagttttctgcactggagacttatctatcccccagccatttattaatttaatcccttgtttacgccagtaagaatctgtggacattaattttatacttgggattatataccactttattttgttgctcaaattgttccatcttaaccattatgaactctttcaattgttcccaggctcaataattgtgggtttttaaaaatcacttccttaatttctcacactaccagatggtctacttccatcttttatatttcttgccctggttctagaattggtcctttctccaggaagctctagttcctttactggggagtggtattagcaccaagatctgggtgctatatttgctcattgttactggggtttcattgtttctaggttgtcttagctgactgagtgaagagatatgtgtatgtatactaacaatgtgtatacacatatctataattttttatgtatgttgctatgcatatgtacatcaagctaaggatgagtttatattaatgtctccaaccctaatctactacctcatgaatcagtctagccttccttatctacaaatttcaccttcaacagaacacttgacttctgcaagtgtgaaaatcaaatcgtaataaccttgtgaacccttaggaagccatttgtctagcagaataattcctaaagggcatggtgtatatagtcaaacttcaatttatagccagcagcactttttaacattaatagaccaccgcaattctggttctgataagatggagtggctgcatttctcccaggtattttcactttccactaaaactatgaaatgaatacaataaataagcataggaggcaccaaatagtgaaaactggaaggcagacttacttcgggacttaagaaatgacctggcaatgagttccctgttttctttttgcctcccacatagctcagacagggcaccacaggagcctccattccataaccaccaacagacacagacaaaaaaagctccaagaaaactctgtgcttcttagccaaagtatgagaaaagagatttctaacaacagaaaacctttctggcagtatgtacacctctccagtaaaaccctaatgaaaccataggtcatggttacagacatgatccatgacttttgtttcagagggaccaggtaaggagttgatcgtgcataccaccctactcttgcccttcacaagcaggcagcactgtggttcccccaccagagttgttgcagtgtggttcaatggagagctgagcctccaccccacccgtcaggaaggagacttaaggagatcatgccagacagagctaattacaaatggactccctgcacacagccatggggtccagtggggagctaagcccccgcctctacttgccatcagcaacaggatgttgcaagttgggtataggaggcactgtactttccttcaaaacctggggtcaggggagaccagtgaggaactaagcctctacacacacctaacaccaataggatagaattaaggtagtgtaaagaaagagagttgacacttcatttccctctgccttggttcagggggtctgttagagtgctgagcctccattcccatttgaaggcaacaacatggtatgagtggtcccattctccttgggaaggtgtcagcaaggccaaaggcggagctaaacttctacctcatctgtctgcagtaaggccatgtgagtcagcgtccctctgttgccagtatggtgtcagcaaggcccagtggaacctgtacattcccacccttgtagctttcttgctacaccccaatataggggagcttccttctaaaaataataagttaaaataagatccagagtcatatactactcataatgttcacaatacaattgaaaactaccaattataccaagaaccaggtaatcacaaaataaatgaaaaaaaattatagtcagcacacactaaaactgagataaatcagttgttgaaattatgtgacagggattttaaataagatatcacataaatgtttcaaaaagcaattatgtatttcttaaaataaatgaaaaaatagaaagtataagcaacaaaatagatgttataaaataaaaaccaagtgaaaatgatagagctgacaaatacaacaaccaaaataaaaacctttgttgggcaggctcaagagtagagtggagatgacaaagcataggatcagtgacctcaagaacagataaatagaatttaccaaatagataaatagaatttatcaaacttgaaaaacagagaggaaaacataggcttagtgaagaagtgggtaggaactcaggaacctgtggaacgaaaaataaaaagctaacatccatatcatcaaactcccagaatgaaaacagccagccagtgagatggaaaaattatctgaagaaataatgacagagcagttccccaaaatggcaaaagacataaacgtacagatttaagaacctaagcaaaactcaaatagggtagacacaaagatattcatgccgaggcacatcataattgaacttctgaaacataaagagaaaggaaaaaagtctgaaaagcagatagagagaaacaatgcattacttacagagaaacaccaattcaaatgacagcagatttcggatctgaaactatggatgtcagaagtattggcataacattcttcgagtactgaaagcaaacaactgccatgcacgaacttcatatccagtttcttctttggcttatattaatgaactattaactaaactttctgtgtctaggattgcaactacccttctccaacaatcaagccccagtatttccaaagtgacctttctaaaacaaacaaatatctgatcatgttatgcaaataaacctttctatcttcttttcctctaacttgaacttttctgttaaaaatcattcaatggctttccatcttccttacaattaaattccacactctttcatacatacacaaaccattctttatctggctgctaccatgctctctgttgtcttctttttttacacccctctaagcactctttataccagttgtatatggcatttctttctgttctgttccttaaccattctttttctttctactgtgaatttatctcctctttgactcaaaaatttacctctccttcacattacacatccatctccagtattgccttctataggaagacctgctaatatttctcacttattattggtccacagaatgaattaagactgctctctcttccattacactatgtaataatttgtactatctggatgccccaataaagtaaattcttgatgctaagataatgattttaataaaggttacactgaagtctagcttaatccttggtatacattaggtgttcagtgagtgttaaatgagtgatgaatgagtggtcaacttgaaatcttaatttttccttttttttttttttaactaggactgtatccaagatacaaagttttccaggagattagacacttaggacctttgatttgatttaatagaggacattgttatcaatgcattagtacttaattacctcaaaagaaaactgtcaacccaggaactaaagtttatccatttggacttacaagataacctttaataccccattgccactgtatccgatgctgtcagaggcccacctacatctccccctacactcagcatttcagtgcatactgatagaattgtgctatcacctgcaaatacctctttagggcacgccagaagtgtgcaggagataacatatctggctgaaactttcaatccctgacagaggggatttgggatataaatacttcgactttctcacccactggtggggataaccctgaggaatgttcttcagggttccacaggactcctctaagggacttgtaacagttccccccaagagtaacctgttcagtgctgtgcctctcttggctttctttcatgcctctattctcaattccagctctactcctgagtttccttgctcactttccaggaacagtttgaattcaaattcttctctcaggctctgcttctgagggaaatcagtctaagacaatcccaaatcacttctagtctcctaataggccaatgtgcctttcagggtcatcactggtacagatgctgagggctggctcattgtctgtcgctcctagattctaatgttttcaatcagatagaaaagagtatgacattaaagttagaaaaaaggtatatgagaatggccaataagtggagggaaagagagatcatgtcatttgttttccataaatgatgaatgatagtatagaatttgtgaacaggtggtctataacaggtatgagtataatttgagaagactactccttagtcacccagaagtctgctattattgtttcagaatcacagtgttggaacctttttgcataatttgcttcactttaacctaatatccatctttctaaatctgtccatctttctaaatctctaagtagtagtcaacagatttattctctccctccatctcatcacaagaaaagccaaacacaaacacacacacacacacaaacattttgtgtgtgacaacgcttgaacagacattaaaagtctctgtaaatatccttcaacaaattccaatgtttatgaagaactaaatttagtcaaattaattttttgaagatctaagtgaagatagaagagaaatctagatgaagactgaagaaccaaagtgaatattaaagaaaagacagaaaacttgccttttttgcccgctaaatcactgactagtagtcaacagatttctttccccaccaccccatcacaaaaaaagctgcacgcacacacacacacacacacacacacacacacaattaattaacaaaggctaaccaggcctcttttgaagactgcttgacttgaaatcccaaaattcaacctatactctcatcacgtgtttgtgttgtgagaattcatactcataaccacgaaagttcctgaagttatgatactgttcaaatgacggatgcttgaacatttgcttaaaatttttaaaaatgaaacttatatgtacagataatttccctttctcttgctatctgcatttcagtttcctgactttctgagaagccctggtttccccaaagaagtgatttctgatagaaatctgaaggtcatctccaagaaaaaagagatctagtatagtcaatgaattaaagacaagaaggtttccaatcaggtaggaacactaattctcaaacatttaattaccttaaaataagtatgctgagaactggttatggtgtgactgtctgaaacaataagtatctaacctaccctacaaggaacctgttcacaatccccttggaggttgtgatgtttatcagacaaaaccttggagggaaactcatacaataacagcatgatgcttttttctatttttagcttgttgttactaagtacacttagtgagctccatgcatgtggtttaatcccaggaggttaggcctgtggagcagcagattaaccctttcagtattttcttttaaaacaaatcattttcgtgggttgtctccgtgaccctctgtgaaggtcatgaaaattatgggtcatgatggcatttagttctttaagaggaacagtcctaatgaatgatgtaaggaagttgttttggttcctatggggcacttctcatcttggtcttgggacaatcaaagtgagcacgtatagggagttgaaagggaggtgaatggagcatgtgaaaggggagctctgttttcatttatctatgcacatcagcatcccactgagaattttcttttcatttgcaatttaagtccaaaacttggggcaaaaggacatcccattttatggaaagaaaagaaaaaaacagcagtaacatcataataagtggctcatcttctcatttgcagttatattaatatatacttattaatatatacatttagcacagcacttgatccctagtcagtactcaaaatgaagacacatactgaataatggatgaatgaagagaaaaagtttgtccttggattgctttgtgtgttggcttctgtagtctcagaacccagtactataactaacacataaaatatgggccataaatctttttgaattaatgaataagtccccatgattctaaggacaattataagaccaacacaaaacacatatttgccaaggtctgtgacagaagtatctgtgacatgaaagcctgaatctgagtctgctgatatagctgacaatttttctagttctgagactgctttttaataatttacatcttatcctttacatttaggcatagtaccttcattagatgtactattcaatgattagtgcttggggagaaaatccatcagataaatttcttaactatattacttgcaaacttttcttttcttcagatttataactgataacagtaattgtacatatttatggggtatagtgtgatgtttaatgcatatatacattgtataatgatcaaatcagggtaattggtatatccatcattttaagcatttattatttctttgtggggataacattcaaaatcttctcttctagctatgttgaaatatacaatacattgctttttgctatagtcaccttactgtaaaacatatttgttaaagcatttttataatgacacagttaagggcaatttcagaatcactagctgctaaaattgttatttatacttttccatgggtagtacagctgcagcagctatttctctatattctgctgttgctatctgctgcatttccaagagagaacaaaatccatttcattaaagaaggaaatgtaaaatttagcataatccagttaccacaaaaccaaaacactcacacacactctcccaggtgtgaaagtgaactagtgatctaaaatagcacactgaaactggtttcaaaataagaggacatttactcatatttgattattttattattttatcaattatgatattcagatatacttctaataacaattctgaattgctagatggagcattcactatgcacaatttttgtctttgtatgtacttatcaataagctacaagattgtctcccacaccttattcttttcctgcattctcttgggaacaggagatgtagctatcattttttttaaaatttctacacagccaaaagactagtatcacttaaataaagacagaaaattgccccaaagtagggagcttcattaggtagcataaagttctcatgtgagaaaggaagaatttcttttcttagctgaaagttctctaagtacaaaattttcataaataaatgtatctgtggttttggattagatctccttctccacaattaatgtctaagggttatcttcggtaaccgggaaatttttattttaaaaacattattatatagtatctgatacatgcaaagtaatgcatgcaaatctgttatatgtaagttatgaaacataataaaaataaactcttgcaaacacaccaccaaaactaagaactggaatcaacgctgcagaatctttctttgtgcttttctctggttctttttttgtcataaaaagtgtaactctgctcttggtttcatattaacattcatttaatttttatgtattttttattaagtatgggttgttttgtggcttataaaattggcatcatactttctgtaactgtgtttgcttttttttcactcaacattattatgtttctaagatatctattttgtttcagctagtgtttattcattgttatcactgtataatacaatgttgtacaaatgtaaaaaatgtgtatattatcctgttgatgttatttgagttgttttggatctattcttaacaatgttttatgagcatgtattttaatgcctcctattatacacgtgcaagatttatcttaacatgtgtaaccacgattagaactgctgggtcatggggaatttgaatattcagctttaaaagataatgccaaaatctttttcaaagttacgcaagtcaactttgaaactcaaagtaactcagtcaagttgcagtcctatgattctacagcctcaccagttatatcagccaatctagttagtataaaacctcaattggtctttgtgctagtttgctagggctgccataacaaaatatcacagagtctatggcttcagtaacagattttatttttacacagttctggaggttagaagtccagaaaggtgttggcaggtttagtttctcctgaggcctctctcctttacttgaagactactgccctcctgctatgtcatcgcatggctttttcgctgtttgcacgcatccctggagtctttttcttcttataaggaatccagtcatattggattagagcctcatgtttaagaccttatttaacctaaatgacttctttaaagggcctatctccaaatgcagtcacactgaggactcaggcttcaacatatgaatttctgggaaacataattcagtctctaatagttttagtttgcatttccctaattaccaataggttgaaaatcttttcatctgtttaatagtcactatatttcctattctggaaaattctgaagaatatcttatgttcattttctatttatcttttcatacttatttctcattgttatttaagttcaatcaagttaaataggtttttggagcttgagcttgtatctaccatcttgctaatattacctgttaataagagtcgattttcttaacaaagaagaataaatgtaaaaagtttttaaatgttgtagatcaactctgttccatagaagtttctgtgataatgggaatgctctcagtgctgtctaacgttgtatccattagccacgtgtttttttgaaaaaatagatgtaaataaaataaaataaaattaaattaaaatttcagcacctgggtcaaactagcctgcatttaaagggttcaaaatccacatgtggctaatgagtgaactgtgcagctttaggtggttaggcaatggacctctacagtcccaggattttgtctttgacagtggcatagtgagatattttatgtaacagttattctggcattaaaaagaaaagttaactaccattagacccaacaatcacattactggttttatatacctagaggaatataaatcattctattataaagacacatgcatacaaatgttctttgcagcaccattcacaatagcaaagacatggaatcaacctaaatgcccatcaatgatagactggataaagaaaatgtggtacatatacaccatggaatagtatgtagccataaaaaagaatgagataatgtcttttgtaggaacatggatggagttggaggccatcatcctttgcaaactaattcaaaaggagaaaatcaaataccatatgttctcacttttttttaattatactttaagttctagggtacatgtgcacaacgtgcaggtttgttatatatgtatacatgtgccatgttggtgtgctgcacccattaactcgtcatttacattaggtatatctcctaatgctatcactcccctaaccatatgttctcacttacaagtgggagctaaatgatgagaattcctgaacacaaagaagggaacaacagacactggggccttttgagggtagagcgtgggaggagggggaggagcagaaaagataactgttggatactaggcttagtacctgggtggcaaaataatctatgaaacaaatccctttgatatgagtttacctatataacaacctgcacatgtaccactgaacctaaaataaaagtttgaaaaaaaaagaaaaaaagttagttaacctggtcatttcttacttttcaaagtaacctaacataactttcatgacatacctaaatttactaagttgtattcatatacgactacaatttatatactaaactacttcttgacataaatgttcactttgtagtaaggttcattctcccaaaacggcacttaccaaagtatcaagaggtatccttattcctgatatgctgtaatagaatgaagaccttatctggtctttagtgtaattggatgttaatctgtaccagtcttcatattcaaaaattcatattcagaattatctgctagtcccatgatggctgtctttgtttcattaagctaatataaacatgtataaataaagttttgattgttttctctcctaaaatctcctatctgtccatgtggaaatgtatctcttactttttccccctcttataagctgttcttacaatttaatcctcatgagtcttatttctcctagttctaattacttagaattttattttaaaatgtaagatatcactggtaagcccctttttagtcattttatagatgacttatagatggttggaagatattcaagacagtgtgttaaagtaataaataatactcagtaatcagaaaacctgagtcttagtcttcacccataaaaatgaaccatgtgaattcaagtaagtcatttcatatgtaaactttattctgattctaaaattgttatgatcgtttatgaaattctgtttcacttatgacaagtctcaagcctatttttaaaatctatttaaaaattatgaagactcaaatattttcccctgaaattgatattaaactgtaatcattcatcttcacttacggcatgctgtagctgcagttgatagacaaaatattatgtctcaacattgtgtacttgtatcttaaatgaacacttttgtttcaaatcatgttctacctaaattcttgatgcctttttcacatttccagttcctatgctgttacaatcaatcacttgtagtagaaaaaaatcattatttttttgtttgctaaaagctctcgttagaatatcaagttttaagttattaatacaacaaactttggaaaataagctctcataatttccaacattgatgctttgtttgactggcttttagaacaccatactctcctagttttcttcctttctcacttcacatttctttctggtctcctttgtgatgcctccatttcttagtgtttattgctagagtgccctaaaactcattcttggccctctacggttttctgtctgtgcacatgagttttattctagtcccattgcttcaataggcagatgactatgactcccatattcatacctctagccttcaccactctcccaggcttgagattcataattcccatttcccactaaatatctctactttatatatcatagacatttcagaattagcaaatacaatgaaatagtttacttttttctatcactttcactccagttgtttccatctccatttgctcaagccaaaagcttgggattcatccctaaactttcactttccaacaatttctacatgtagtccataagaaactctttccacctctaactttaaaatctgtcctggatccctctacctctcaccgtcttcaccctacagcaagccatcattgcttgcctcacctagtgcaacaggcagtctcttacaggatcttcctccttcccctcttgccacggtccttctagtttataacaagtacaatagccagaataatcttccaaagaaatttaaaccaggtaacattcctgtccaaaaccctggctcccatcacttttaaaataaaaattaaactgccttctttgacctacatggccttagtcaatgttccttctgccttactgtccaaactcatttaccactttccccctcacacactcgcctctagaatgtttttccctaaaagacttttccagcattaggacctttgcacttgttattttctgaacctggaagacctgtaagattcctcaaaataagatctcagaagatagttgcattttcattttgtggaggcatttggtgagagacattttgcgaaagatagatacattttactttggagggtatttacacgtttagcaatgagcaagtttattaaataacaaatgcaaaagtgatagagcaaaggtgtgtattttaaacagagaaatctgaggaattgtagacatgtgagttacaccatggcttcaatatttaatgcataagaatcacctgagttgagttccagacaaccatttccacccataaagattctgaacaggaaatcaagatggcctggggacatcccttttgacaaggtcttcaggtgattctgctgcatatggtttacagacaaccctttgagaaataccaagctggtatatttgttcagataaacatgggctggtgcagagcaccagtggtatgcaattgaggaccagcagattacatgaatcctgagtggcaaaagaggaagacaatccaataaagaccactacagatactatcccaagcactcttggcatggagacttgaaaatccattcatagaaatgaactgttaatcattgaattgtgctatataattttttaagttgcgaagtattaaaatatttagataaatattataaattttgtcacatattgctataaaatgatgcatacatatgtcataggtataaagatacagagcatatagatacagatatgtaaagaatatgtaatctaggcttaattatttagctgatactgcatattgtctttataacttcctaaagaaccacttctaatattctctaggaaaaaatattgtttctctccattctttaccactttcctttcctcatcctcttccttgtcctttcccttcttaaacaatttagtacaaaagccattcgatgaggcctagtaagcctttgtcaccatgggcagggtgggtatacagggtattgcagaggttgggcatttgctattaaagcccaagaagtagaaggagggtgtctgcaccgaggagcatagtgtgagctgttgaaagttattggaaggagaaggacatctacatggggaagtggccacagcaaccactcaatacagatagttatagtctgtgctaggtggggagaatgttataatggggtagaaaagtggtagcaacaataatttgttaaaatacagggagattgatctaataagtgcgaatattaaagatgaaggtaatcagtgtttgtcactgtctgaggaggaagttgaagtatgatataggcaaaagctagaatgaactctggtgctggatgaaaatgggggaatgaaagtgctggttttcaatatatttagcaaatatagaattaaacatagatgtaaggtatatatgtgtgtgactatataactgtagatgaacgtgttttcacatgtatgtatgtatgtatgtctacatacacataaatcccgtagctcagtctattgcaaaggcctgggacagctattccccaataacagtgagcaaacctagtgtccagatcttggtgtctagatacaattctcctagtgaaggaaccagagctttctggagaaatggctgattcagatcagagaaagcataagatgaccctagaacatattgttccaagaagcaagaaacatatcaaagaatgacagagagatgtcaaaggacatattggccaaattgaaaggatttcccctgggcaaatctcgaacaatctgagcttcaaaataaataataatagaaactcgttgtagttaatttaataaaatggtcaatgagtttatatcaatataaataaattgaatacattatgtttggtgagaaataggatatttacataagcacaaagtatcttgccacaaaatgtattaatgttaaaaaagaaataaataactttacagtggagaagactgggtggcaccttttaatcaaatgagtaaaattagtatcccaataagggtacaaattaaaagtttgcccaaattgtctgttgataggatgtggtgagaatagagcttcactgtgattttcctgccaaaaaacacatcttctgaatctaatcatgagacaaacacaaacagctaaatcctacaaaataactagtctgtatctttaaaggttttaaggctatgaatttcaagggaaatccaagaaaatgtaccagataaaagaaactaagacaggacaactcaatgaaatgtgattttaggctaatccttttgttattaagggcattattgggataattgacaaaacttgaagaagtctgaggattagacagtactatagtaatgtatcagtgctaattgtcagattttcttgttaatatttggatatgtttgtaggaagcgtttggggttgacagggcattgtgttgacagcttactctcaaatggcttgagaaataagccatttttactgtcttttttactgtcatttcaacgtttttgtaagtgtgagatcatatttttaaaattatgaacaaaagacaagtcatccctgagtcagataatccttcttcaggcagctagtacagttaaaagctgtttacaatggtagtgggcttctagcctagtggtgctaatctctcttgctaataccatgtaatcccagcaatatttcgtgtttttttttttttttgaggctttgggattttttttctaatgatgtttgtattagtccattctcacgctgctataaggacatacccaggactgggtaatttatgaaggaaagaggtttaactgagtcacagttccacattgctggagaggcctcaggaaacttaaaatcatggtggaaggcacctcttcacagggtggcaggagagagaatgagtgcaagcaggggaaatgccagacacttttcaaaccatcagatcttgtgagcactcactatcacgagaacagcatggggggaaccaacaccacgattcagttacctccctctgggtccctcccacaacacgtgaggattatggaattacaattcaagatgtgatttgggtgggaacacaaagccaaactgtatcaatgtttttgttttcttttgatgttcttactgtacaaatgtctataaaattagtaaagttctctgtattacaataaaatcaacaagattcatgagaatgaaaatacgttcttcaagaactttatatatttctacctgcactcaaattggaataaatgggcatgaaattcataagaaaaaacagatcataaggaactttcacactcgcaaactcaaaacagttgaacatgtttaccctgtaagagggcgatgataaagcagcagggtgacaattatatatccaaacagaaatgcaaccttttaaatcatccatgtcaggccatgtaacaactgggcaattcagcaaacaagttcaaaaaaattcctgttttcaacaatttctcaactccacacttagaaaaatgaaaaacttctctttaactctcagaaacctgggcacttatttagttaaagcaaagctgttgtctactggcctatacctggttataaatagcagcaagacatgagaagacccagggacactgaatgagctttctaaatataggtttttcttacttcaaaggccttttagaagaataccatactttgtgaaaacttgccctttatgaagggcacacagacactaaagtcagcaatttttagaccttgaaaagttttgaaatatgtctttagtttgagaacccacattttggaggcatgaaaactgaagtgcagagaaattaatatttttcccaacatcagatggcaagcaaatattgtaaaaattatggcactgaaacccctgtcttctagtcaattgaatgcagcttgtaacagattgcagtaactgcttgttttcattgccctcaaaaccacgttccttctatgcctcatccctcttgcttttgtgagaggcataatagcattacctgcaagtattagctgtaagaaatatttttcaattttacttttttgtaagtctcgaaatgctgtttctgtgttaaaaattggtgagagcattttcctttcttctttaaatgactctgcttgcatttgcagtcttttacagttgaattactgtataacagtaagtctaaaaacacattttagtagaggagattatagttggagacagcaaggtggggactggagttgtcataccttagagggaggtgggaaagagacaatgttggcttgacctaatctattataaccttccttaacccatttatgcctagtgttccattatcggaacggtaagtttgtgggagtcatttatatcccactgctcaaagtcatcaccaaaatctgatttttcaaaaaagaaatttgcaacctctggcatcaatgggctaattgaagtcccagaatgatttctgttgtttgcattgccacaggcgagggagtatagaaagcaacaagattttcatgttttcccatttcatattaatttcctaaggatttctataagacttttaaaaatatatgtaaaacagcttatttttagttttcccctactcatttgcattttaacatgttgataagtaacatttaaactcagtagttatgattaaccctgttctacaattctaaaagtactgggaagtgtgtgtgtgtgtgtatgtgtgtgtgtgtttgtgctgcctttgcaaccaatcaaatatagctctcagttgaaaaacaattattatcatatagacaataattagatttgatagtggggccagccattggtaagtttaaaagtcaccctaggtgatttatatatgcagttgggttgaacacctctattcagatgaagcacttagatggaagtatagccaagcatggctataatttcacatctgaaacctgttttatcctgagtcatttgcatagtgcttattatatgtgtttatagagtctttggttgtgttataagatattaaaagttggtgtgaattaaagaagtgacatgcaatgatgaaagcctagaagataagcaccagatcttctaattataactcaaatgagtttggttgatacaaaatattatgggaattagacacaaacattactaatgcataatgctggaataaaaatcttagagttatgtaaatatgaaagacattctatctaatttgtaccacaaggtaataggttcaagcatttttatttgtatgtatttactttgtaccctgaattgtgcagaaaacacttttctaaaatttagagtgcaaactagaaaatataaatctcgagtagttaatattgtagtcaaaggaaagattttgagatcttttaacgtctcagttcacagagacctcttcctcagatggattggtttttatttgttaagattaatgtttaccattttaaatagtttcttgaatattcctggtaatggaatagagtcataataataatttctagttctgctaagagagtcaatagtagagctgcttgatattgatagtaattttgataatatacaacatgtcatgattttccagataacaacttgtctcttggccaaaataaatacacatattgtttatcttgttaccttataaaaaatttttttattttgttagtatagcgatttgaccactttttaaattaatattttaaaatagttcagtggataatctcattttgaaatgtctattgattgatatatccattatatattttatatatatgggtatatttctcattagccaaattgatactttcttatttacacttacatttaaatcacatttctgctctacagcattttcttttctctagagcctattctactgacttaaactagcctgaaagatttgaaaattctatttaaaacaagtgtatggaaaatctttgaaataacttataacagtgtcagagaagaagagtattacacattgtactgaagagcattccattaataaaaagattaacaaaaaattctaacaacgttcagacatgtaatagcaatgaaaaacattaattataatactgaacaattacattttcggtagttaaaggggataaaaaatgctatataggaaattagcatctgcagagaagatattataaattggcagtgattatgtgtagatttaaaatatgttgaaacatgatcatagcaactgtttttctttttggttgaaaagaggcatattaaagtgtttaagcactttttcgattggagtagatatttagacactgtacagaaaatacttgcttgcagaatagcagatattaacatgtgtatgaaatgtgtgtttttaattaatgcattttcattcactcagaaaagaaaagatcgccgagtttagcttaaatgtagcattgtggcatattaaaatggcattcttagactttccacgttgctgttccttttgccttcactaaacagtgctggcctctcatttatccaagttagaaatctagatgcaattctaaaattgtcaacctagaatcctctaccttcatgcttcccactcaataaatcactaatatctgactctcctatttcaccaggcagtcttctccactgcacccctgctcccttattctcagggcctaccatctctgcctcaacctgccaatcaaagtcacttctatttcattatgagcagggccatttttaaggtttctcccatcctgggcaattgcacttttggaagctccacactacattttatcaaatatattaaaatgtatccaaatcacatatttaatataatttattacataactaagtaggagatgcatttcatgagttgtaatattagtgctgataatgttaataaaacatgcttttaatctcacttttgcattttcaaaaatattttggaagcttttttttaggtgtcaatattttcataggtctttctcaaactcatagtctctacagagtgtgcttttactatcacaaggcaaaacagccctaacagtgaggcaactgaatatgaggaacatcacctggataattaaaccagatttgtgggagatggaataggaagtgtttgtagaacaaatacagaaatcaaggaaaagatggtggtgtcaattaatactctgcataggagatcataatattcaaaacccagatactgttgagatatcaatagactatcaccctatagagtaatacctcaaaacataatgtaaactacttacatatttaaaaagaaatattgatggcaaaccattaacagaaagtgaaggaagtttataccccactgcaaacattggaaaatggtaactgtaaatggttaaatcacctattagtttcatgacttaagatttctaaacctttactatttcatcttttaaagtgagataatgagaatactgttttgagagagttgttaagaaatttaaattatataatccatatacacagatgtgatatctggcacatatgtaatatttgtttttgttattgttattattcataaggcactattaaaccgtagctgttttgttattcttatggtcattattatatcttggaacagaccagaaaatattactgagcttgattggatcctttttttgattttaaagatgaaaaagttaatatgagttattttgataactgtgtcagtgttctaatatcctttgaaaatctaagtatttatttaacataggagggcaagtcatagattaatgagaggttatagattttaaaagtatctttcttccttggactcttacagagccagtaaaggaaaagataaaacaaataatttggcaagtattatataacaaagaacaccaccagccccaggcccttaatgcttttgtgattttgatgtgaataaaccctggtcccctctctgacgtcagtactgctgctgactgggtaagacattggtcaagtcgattaacctttcgctgctttagtttcttcttttgtaatgtgcaggtaatattacttgtcacttgccaaccagcagtacttctgcagctaattgactttctcagcaggggtattgcaaagattagtggataaatgatttataaaccctttgaaatattaaatatatgatataaaaagccctagcaaaaggacagaagaaattattccatgctttaatttgctactttcgtcatatatatttgataaaaaacttaaaagaggaagccatcaacgaagtgaaaataggttagattactcgggattctagatgctttctattgctgttattttaaaaaatcttttgttataattgtgaatataagaaaagaaagtgtgctagagatcataactgtgtttatcttcttaagtttataaaaaatatttcattagacaggaaaatgaactgggtaagaataaggacacatactctcagcctagttttactatgaacaactgtatgacctcgatcaagttacttaaacaaggaggatcttgagtaagataatcaagaacaatctacataatacattttgtggatttaggaacaaaatacaaaactctgtgccatacattgtagtggattcgaaaatcaaagacccagaaatataatataaagaggtcaacatgaaaataataaattctcacataagacagaattaaatcaacacaataacaaagttatttattctacctggagatggagaaagagtgtgactggaaagataagaactggttgagaagaccaataggagaataccaagagctttggtactttaaatactttgggaggctgaggcgggtggatcacctgaggtcgggagtttgaggccagcctgaccaacatggagaaacctcgtctctactaaaaatacaaaattagctaggcatggtggcgcatgcctgtaatcccagctactcaggaggctgaggcaggagcatcacttcgacccaggaggcggaggttgcggtgagccaagatcatgccacggcactccagcctgggtaacaagagcaaaattgcatctcaaaaaaaatataaacaacaacaacaacaaagtgcagtgtaaaacgctaaatacaatttgatatggatgactattgtgaaaagactattgcaagagtgaataattatttggtgaataattatttggtgaataatctgtagtgattatttagtgtacagattatttggtgtacagattatttggtgaataatctgtagtgatagttcctgagaaaacagtcctcctaagttaatagatacatgtgtaaaattacaaggggaattaaaaataaagcagtgtagaggaagcagggaaaattagtatctacctcttttcctatatgggagtaaatgaaagaaaaagcgatgaatgtcttaaagaacatgcagggttgattgttccattgcaccccagcctgggcaacaaagtgagaccctgtctcaaaaagaaaggaaaaaaaaaaagaaaagaaagatttaaaaaatgcagagttaaaagataaaagattttataacagggaagatgtaagcaatttgcaaagtgttaaagaagtagctgaagtaaaattgtaactccagaagcaagaggcagaattgaaggaatgataatgaggaagaagatagaatcaagagcaccagtcaggtattaataatggtgggcaaaaggactcttgaataaagagatggatgaccttaaatgtgataataaagaaagaggattgaagatgaatgatgaccttggtctccacaaagttattaggtaagatttgctatggagagtaagaaagcaagatacaaataaaatttaaagagcatacaaaaaaaagaaagaaagaaattgtttttattagggatagtataggggtaaaccaggaatgagtataagaatttatgagtagctttgaggtcactcgttgcccaattataaaagtattttctaaagaaagatagtacttctaacattttaaacatttacaggtaaagagttctcattttaaagtttttacgtgttaaacattgtagggggaaaaagtatttgagtctgatctaaagaaagttcgagaggagaaattaagtaatgatgccattcggggtggggaagaaggctgacatttgcaggaatgatgcaaaagcaaggtgggggtgggcagggaactgctggaacttttgcactaagcaagtcagtggcactgaactctcctagtgatctatgtattctgcacccctacacactcacaattagtatttttttagttccaggtttacctaagaatgtacttgatgaagcagtaaaaaaaaaaattcattttcttgaatctcgacctttgagtacacatgtttttaatattcatgtgatgaaatgggacatctcatgaagcacttctgttgtgtatcaaacatgtggttatcacaagtaaagcaccttgtgcaactgtgggttgagagctgagccagacattattttcatggatcaccatttttacttgaacgaacaagtgacaggcaaactagttgttcaaacttggacatttggcagaaattttcttgaaaatgaacaaagtgagcttgtcacttctaggaaagcaaaatctaacagtgtcttttgccaatgaaaaaatctgaactttcaaacaaaaattataatttcagaaaacctattatctgcccctgtgaacttgtcagtttcccaattcttaaagactcttcagatgacatagttggtgttgccaacaagtgtgatattgtataattaaatgtgctaccgtttgggaaatttacataacccagtgtaccaatattttccagatgaccaatgtctgatagttaaaaaaaaaaaaagaaaaagaaaaaaattgcgtggacaaaagaccatttcaaactgcaagaaagacaatgggaactttctaaaggcagagtatggaaagcatattcatatgacttcagattccacattgaaaaaaagccataattatctgaaaaggctattaaaattctcctcacttttccagctaaaaaaaataatatctctgttaagccagattctcttatgtacttcaactaaaacaacatgttaagagatactgaatgcagaagcaaatatgagaaaccagatgtcttttattaagccagacatttgcaaaattaagccagagagttgcaaatgtaaatcaatgccatacttgtcactatttttttttttgctttggagaatatattttattttcattaaaatatttatataaagtgtaatgggtttattcatagtatttgaggtgaattaatacttatttaatttttttcagtttttctaatttcccatatgttaaatattggtagatttatccctggagaatgaaagctaagtggggttcttcataatttttgagcatgtaatagatatctgagaccaaaacaattcagaaatactaatgtagaccaaacactaaacacacagtaaactactcaaggtctttaaacatacttcccatgatttcacaaagtcaaagttgagaagttatataattgcattttgtaatagtggaaaaaggggaattttctttctttctttcttacttaaaaggaatcatagtattcagattaaagagaagtcttcagcgcatgctgatgacattctctccattctttcctccaagtctgtgagtctcatttcatgtgtcccatttacaggagtaaaattagcatgttacccagtcaccatttggctcatgactcaatgtcactataaaaatcattttagcaacatcataggcccaacttctagaatccatcgatgtggaacacttcagtttgtttaacgtaggagacgtaagtacatgcttttcatagcctcttgaaatctgtctaaatctgtaaattctactatagtaataccttatgcttcattctctcaaataatttgtgtgtatggaattttaaaaagaaggcacaaaaaggaaaagatcagcacagatcatgagtctcagttttgaaatccattatataaagaatttgtagagcagcaatattgcttctgttgctaaagagtaagagagtgaggctgtattaagaaaagagagagcaagattatttctaattcatagattttgattgaatttttagatgtcaggttttagagatttatgctttaaaatttaatacaactttaaatagttcagtatttaaataataaaatgtccatttccctcttttccctatcccataaggctgaatattagtataattggatcttttgtataactggatacaaaaaagtaacaccatattaccttgtctgtattcaatactatcatttggtcatgtctagaaaattccagttatagcaacatagacaggaaactctagtaaagaatcaaagtctacttttaataagttttccagattttgtcctgattatttttataaagtcagaatatgtgctagttgctggtctactaaacttccgtctgctgctgacatttatttgactctttttgaattttgtaattttggggggtgaatatctgtcaaacataatttttatggctgttctccagaatttcaaagcaaaagtacaagtcgtctatacaggtatgcttgatgtaaaatatatttatctctcagagtcatattactaaattagaagacctgtgtctaaatgcttgactgaaaaaaaaatagccactaggcaggtaaaaatatctatttttgagcacttaaggggaattcactaaaagcactataatcatagagaaaatctggagtatacaatatatattttgtttaaaaatgtaattgtatgtgttccttcattcacatatttgttgtgtgctatttgttagctattgctcttttattggaaaatagatctattgtctagggaaagaaaatataataagcaatgaaatattacttttatagtaatagctatttctattataataattatattggctactctaactggatatccagtgcttagtttctatgttactttaaaggttcagaattggatgcacatggaactaaaaatatatttcaactttacaggaataatctcttctcacaattgtctctattgtctttcattcaattgaaatgaaagctatatatgaagattttaaaagtaagcacaatatacttttatgtctttcataacctcatttcttccttcatgtgttcattacttgggagtgcactaaatgaaaattcaaagtaagttgttgcttaccctcatataagtagaattgccaccaggatcttttaaaattcccacatagataagtcataacacaagacactttcttttatatataccttctcatggaaaatgttaccacatttctctgcctcatttttggtatttcaaatcttttaaaaactattttcagcaaggagaattagatataaacccctacaaggatatgtattatcatggcagttagaaatgataatggcaaaaaaacagggacctttactgcaaagtacaatgccctttacacaaaacccaaagacatatacccatagtttaagtcatggtaatatgtatgatttagtggttacttaaaatctctgagacttattttctccatctgaaaaatgaggatttgttttcctactttacatcattgttatcagatgagaaataatagcactcgtgcttttttcaagcctgtttgtttgtttgacacggagtcttgctctgtcacccaggctgaaatgcagtgacccaatcttggctcactgcaacctccgccacccgggttcaagcgattctcctgcctcagcctcctgtgtagctgagattacaggcgtgcaccactacgcccagctaatttttgtatttttagtagagacaaggtttcaccatgttggtcagggtggtttcgaactcctgacctcttgatcagcctgcctcggcctcccaaagtgctaggattacaggcatgagccaccatgcctggcctaagcctatgtttttaaaagccatagaaagagactaagagtgaaaatcattgtgaaaagagcttgaatatctcttgtgactccacctctccttaaatatttataagatgtatttgctagattgatgtgcatgttcagttctaaacctttgaagtaatgcagaaaccaaatactgtgttggttaatggtaatgcatataatgaaaatatcttcacaattaataacactgaattattccaagttccaaaaactttattcaaactctgacttactcatagacaggctgcctggtaaagtaaaaagcatgggcaggaactttgcagacttaagttccaagtacttaattcattaactatgcgattatgggcagattaatttattaactatgtgaatatgggcagatcacttgaattatctggtactcaggtccttcatctataaaaacttctagactgaagtagatgaatttttaggatttagtaatttagtacaatcaggaagcaggaaagttttctgtggccactgataaaaggtgattaatatatttcttcctcattggtcagttctatttaacatattcttatttaacaatggctatgtgcaaacaactctgctagaaattgtatgtgattaaaatattaacaaaatgcagtaatctattgagaaggagaagtaactatagctctagttagaattaagtgccctgtagggtacaaatcaaacctttagatcgctacctgaagagatagggaaattaggtaaaagagaagatggtgtttgactgagttttgagggctaaatctactttaacaagaaagtttgttggggaaaaactgttacgggtggagtaacagacttgaaccagcacagcagcagagaaactctggaaaaatattgctcattattctaaaacataccatgtatgagagcaagtggttgaagttaaaaaaaaaaaaaaagtgagtcctttccagatcatggaaggctttaaaagaaatgctaaaaaattcagaatgtgttctataggctgtgcagcaggcttgaaaggcctttgagaaaggcaaaatggtaacacttactgcagcattttggataggttgggacgtggagaaactcagggaatagaaaaactcagcatttggttgatatgcatgttcctatgtttttcctgtgttttacagggactaaatatgactggcatcaaataaaaatcagtatgacctggcaagtgattagacatggatatcaagggagagaaatggggggaaatatattctccaacatgtgtcatgttaatgagcagtgggtaatggcattagaggtggaaggaaataaaatcaatagcatgtcttaaaaaggcaggtcaattcatccgaaaaagaaagaatggtgattacacatagaaatgttgtttgaaaaaggaagaatttttagagaatttgtaacagatgtcccgtatcttctcagaggaagatgcagagtcatctcttaaggtaggtggtgtctggtgtgtagactggaaagggtttggaatccttcccaaagagaacagcataaggaagagtcaactagaggtgaacagaagaatttctgagcaactccatccaagtgtatactaataatagagccagaaatttctagttgagccaattggcacaattttgtgactttttctggtaacacttagccacccagtactgagatcagagaaaatatactgtagtgttttcccagcagtgaagtgtaggtacgaaagtaaagataacagtagatcaaagggacttcttgatgctaataaaaaaactacataaagtagtgggtaactgattcacgtaggactggacctagaggaaactaaaaagtgattcaaggaattaaagacagcatcagtataaagaattggttcattgagtataagaggaaaagaaaaagaaaaggtggctgtgacgaggggagagaatttccagattcagaattttacaaatgaggtggttttggtttatttttgtttgtttcaccttccaacttttattttaggttcaaggggtacatatgcaggtttgttacatgaataaattgcatatttcgagggtttgtacagattattttattacccaggtaataagcatagtaccctatagttttttgatcctcaccctcctcccaccttccatcctcaaataggccctggtgtctattcttcccttctttgtgtccatttgtactcagtttttagctaccacttataagtgagaacgtgcagtgtttggttttctgttcctgcattaatttacttaggataatggccttcagctccatccacgttgctgcaacagacatgatcttgtccactgttgatgggcatttaggtggattctgtgtctttgttattgtgaaaagtgctgtgatgaacatacgtgtgcatgtgtctttatggtagaatgatttatattcctttgggtgtatacccagtaatgtgattgctgggtctaatggtagttgttagttcactgagaaatctttaaaatgctttccacagcggctgaactagtttatattcccatcagtagtgtaaaagtgttcccttttctctgcaacttcaccagcatctgttgatttttgacttattaataatagccactctgactggtgtgaggtggtatctcgtagttttgatttgcatttttctaatgattagtgatgttggccagtttttcgtatgcttgttggccacatgtgtgtcttcttttgagaagtgtctgttcatatccattgcccaatttttaaggagctgtttgcttttggctttttttttattgtatttatttatttttttaagacaaagtttcactctcgccgcccaggctggagtgcaatgggcgtgatctcacctcactgtgatctccgcctcccgggttcaagtgattctcctgtttcagcctcttgagtagctgggattacaggcacccaacaccaggcctagctaatttttgtatttttagtagagacggatttcaccatgttggtcaggctggtctcagactcctgaccccaggtgatccacccaccttggcctcccagagtgctgggattacaggcgtgagccaccgcttgttgatttaagctccttttcagttctggatattagaattttgtcagatgcataatttgagactattttctgccattctgtggtttgtttgtttactctgttcatagtttcttttgctgtgcagaagctctttagtttaattatgtcccatttgtcaatttttgcttttgtggcaattctttttggagtctttgacataaattatttgcaagggcctatgtccagaaaaatattccctatgttttcctctagagtttttacagtttcaggttttacatttaagtctttaatcaattgaaattgacttagtccttgagttgatttttgtacatggtaaaaggaaaaggtccagtcttcaatctacatgtggctagccagttatcccagcaccatttattgaagagagagtcctttagccattgcttgtttttgtcaattttgttgaagatcagatagctttaagtgtggctttatttctgggttctttaacctgattcattggtctctgtatctgtttttataccagtatcatgctgttttaggttcccatagccttgtagtatagcttaagtttgggtagcgtgatgcttctggcttttttctttttgcttagggttgctttggccatttggactcttttttggttctttacgaatttcagaaaattttttttctaattctgtggaaaatatcgttggtagtttgataggaatagcattgaatctgtgaatttgggcagtatggccattttaatgatagaaatgaaagggttttgagtaatcagtttttgtaccttttgacattttatttccaagatttaatcaagagtgtttgttactcctctcaagtaatgacttatcaaggggaacgtggggagctgtttttctggactggaagcgctatttgatcactgaaaatatttagaattgctggtgcatggtgcatagtggtaataaaaagcaaactgaattttggcccatttcattaacagactgtacagacaatgctctcacttagtgcttacccctaggatgaaccactttttacttagcaccccccacctgatctcaagttctctctggagttgaagaatgactaaaatggtattagagaaagaaaattttataatgtaaactaaatgtcaacaaactatggcatgcaggccaaatctggcccattctctatttttgttagtaaagtttgtttattacatttgttttacgtattggctatggctgcttttgtactgtaaggacaaagttgagtagttgggatagagatcatatgaccctcagagcctaaatatgtactatcaggcttgataatcctacctaaatgcccatcaacagtggacgagatcatgtctgttgcagcaacatggatggagctgaaggccattatcctaagtaaattaatgcaggaacagaaaaccaaacactgcacgttctcacgtataagtggtagctaaaaactgagtacaaatggacacaaatataatacataatactgtatattatgtaaaaatacataataatatgtattattaattattaataataattaatattattacatttaatattaatatattaatattaaatgaatattaaatattacatttaaatatgtaaaaatgtacatatttaaatatgtacattaaaggttcccagacctttgatctaaatacttaggaccagaaaaggcattacttgttttgtgaacttgtaaacaggacaattgtttcacattcatatactaagtcggtagttaaatgtttagcattgactaccattatattcacctattaattttcctttcttttgtagtccctgctatgtggatatttggtagcaatgactgatgtggaaactacatatgcagattttattgcttcaggaagaacaggtagaagaaatgcaatacatgatatcctggtttcctctgcaagtggcaacagcaatgaattagccttgaaattagcaggtcttgatatcaacaagacaggtaagtcatctggcacacatttctctatgagcatggaatgatttgcggcattttactaagagggattaaggcacgaaaagccatctttgaaagtaatctaatgtaaagagttttaaacaatctaaggcaagatgaaagtctgagactaatctcttaatcactcctgctctattttcaatgatgtctgtttagaaggcttcccactcaaatgcagagtccttaatctgattttattaatgcaatcaataaaacacatggtgtgtttttttaaatcctaatttctataaaagctgaaattgcttatgtacagtatttaacaaagttggagctcctacctttgacaatattggccacctctaacatttactaggtagatatttaacaagattcacaggtaattctgatagacttcaattctaagaacaattttagtaaaaaagagtctccagggctaattttattaagaatggaagtaaaatgatctgttacattagtaactcttaggtaaaagggtctttggtttcctattccagatagaatgggtttgtgaaaaatttgtctccttactgggccttgaattcttacccaaggagtctatcttcattaatgaaagagaaaaacaagtttgatggattaaaaaacttgacagttttacttctgagtattagaataagtcccctgatagttcctccacccatagcttttgcagatatcaaagctgaatgtgtttccctgagaagacttgtgtaaaaataacccttaaaagtaaaaagaattcatgattagggaaaccctgatattatgtgcatggaaagcacttatcacagtttctgactcttaattattcaatatgtcttcgctgttagaatttttaaggtaaaacctttagattattagaaaactgagtcagagtatatgtatatatagattaatgaaatggctcagcaacattactttaaaatatataaggatggtattttattcaatggctaaagctcagtatttcccagactggtcttttcaaattcagattaataataaaactttaacatcaccactttggaatatgtagacctgtataaatcttaggtttcattgttgtgctgttattgctaccagtagttacttcccagaacagctctgagaaagactgtatggggaattattccaatttcataacatgagatggataaatatatttttgctgcagtcttgcataagatttatattttatttttcatacaaatatgctactttaaatagtctgcattaattttagctgctcttaatattaggatatttttattcatagtacaatttaatttcttctttttctatttttcctgaagttgagaattgttagccctaagactgttttattttcctgaaaacatattaaattattataaattattgaaataataaattaaaatgtaatattaataaatataaataaaataatttcatatgcattattttacaattaaataatttaaaataatttaaattatctttatacttccaaatgtcttcttttctaaatatttttgcatgttaattgcaattcactaggctcttgcaacattttctgtttttcttaaaattataaagtccaaaaccaggaacagtatacaaagcaataactttgtttattctaagtacaaaaaactaataactgtataatatgaagatctaaaatagaaaaaatggcaattatataatgacaaattcaacgtcactaagaattgtgaggaattttttttgtaattcgtaaatgtttcagcttcattttagtttatactcaacaatattgttgcttcatgtttacctttatttgttaacaggcatctatttagcaacagtctctatgttttcagcataatgctaagccctgagaagtgtccccagacatctagagggtcccaagccccatgggagtcaagttcctcatcttgtatttatacaatcactttcatcctgaaatattctactgtcttacatatgccctaatttgacttcatttctttgattaccaaaagcttctcctgtttaccaagttcttgttgcatgcttaatttacacatctcagaaccaggccatctgcacatcatgcgagcctctcacaataaaatagtgcatgaaaattatatataatgtctggtcatacccttggtactgctttagaagaaaatatttttatgtagaagaattggttttaatttccctaaagatttaatgttgttggagtatggtgaggtgctttgtgtgtacttgctaagagtagaggagaaactgccttataacattatggtccaaagaataggccatccaacttacctgcttttatttgaattatgataacaaaccctcagcaaatattgatttgtttatattattgcaacacctgaaaacattttgtttgccaagccatactggctgcctgataacaaaatatcgcatgcagatatttgaatctgagtctagaattgccaacagcttgcacttatataaagtgacctaatatggagtgaaagcattgaaatgtttgccataccactggctaagattgctactgagggtgcagttatgagggtggttttattggaattgtgcacatgttctctaagggcagaccagaggccattgtaactatttgacaagggactggccagctgacatagtgtcctttcattttcaactattgcttttactttgaactaatagaacctctgagaaattagctgggttatcatcaagtgctataaaaaggagaaaatgcagttttaaaatatttcttcaaataagacaatcaggcataaaaaggtaaacatgctcccacttctgatttctacttaaagacatttctgatttctgcaacctgtgaaactatacctaagtgacatgacctggccttgagatttctgagctatttatccaaagcttggctgatcactaactactctgaaaatttgaatattattttgtttttgagccgtgctgtcccaagttcacagaattaatcagtccttgaaaacttaagctgttttcttagtggtgaactgactaccaagaaaatatacttgttccttcaaggtttcaggcctatttagtatttctgaagttaccaatatgacatattgacagttggtaaataaaagcaatcatttttattttgcctttattctgttttcgtttttcttttgcagaaggtgaagaagatgcacaacgaagttctacagaacaaagtggggaagcccagggagaagcagcaaaatctgaaagctaacaccccactttgaccctcgaccacacctgaaaatgtctcaaatctccaggagtatctggaatgcatttgtttccatgagtgaaaagaggaaaaagaaaatggctgtgctgcattgcaggaacctgctcattatcatgttaaaaatgagggcagaggctgtggctgcaggcagacttttccctacctctgtcattagcaatggttgaaatcatgtggcttgtgtttgggcgtcatttttgtatggatcctttcacttgatcatatgacgaaatgcttatagagagtagctccgacctagatgatgattcttcctgtagcatctggcccctcacaatgtcagaggatttaattgtgtctaattgcgaagggttgattgaaccccagagtttaaatatctctggctcaagtgttcacccagtaaaagaaagatccagaaagcactgtttttagcattacgtatctgtgtgttactgctgtgttatttacactgttttgtattgtacaatatatatgctcagcactgcccccttctctgattgcttatgaaaaacaaaatgatgtacattactgtgaatttttataccactcatttttaaaagggctgtcttttcattttagttttccatactgtggtggtgtacacaggatagaacacccttttttaaaacacagtctttccccttgctcattgtatgttgatgagttgattaagtctaacagattcatcaagactccattgctttattatagagacatttgaaaatatccattaatgtgaatatcacctgaattcagtctgtttggtgtctgcacagactggaattcaatctgtcaaatttgttttattctcaagtggagaacttctcccacataatatatatatatatatatattttaatttatgagaattttggacaattggaaaggtagaaaagaaaagccaagatcatactaaggactggaaatattttgttctatggaatcaaatttctcacaatgctgtatgatactatttaaatttggaggacaacttatcttcactaagctgaatcaggtggagaaagtaatctccttgcaatcatgtggacaccaatcacaaaagtaaagccctggtgttgtgttttcatgtcttttttcagccctctcagatccaaatgttattatgcactttttaatgtttgtaaacttttactaataattagtgtgaattgcattctgatacaataatgattatcattagaagctaacaaaattctcattaatactgtgtttgatggcctctgctgtgttttaacatcgtgcttcttatatggaaagtttttgtgagctgtgtaatccctctggtcagtattatgaaatcatttgtcagtggtaataaataaggaaccagtaatatgccaatggttcatgaattactggacaaatagcagacaatgggagtccctttacaataacgagcccacttagctgtccttgagggcttagataccttgccacgtgaagtaggtagagcagcatttcaataggtaatttgtgtggttgtgccagaaactcagcccttctatgtaattacatacaggataaaaggtaagtctgctcacttctccttctacagggcatttcaactgactggaataagggcatggttgcatttagtactcaatcagatattactagaaaaaaaattaataatgtgagcctttccgagagcagaacgaggaaagattaaattttagaatgcttccttctgtctaatccatcaggggccaaaatgcccagtaaaattcaaacacatcacctattaatagacttacaagtgagaaaagaggttcctagggttattttaggcaatccctggtaaactgtttaaaccatcaaacccctacagtcagttttcagtatcctcatttaatattttaataggtttcttgtgaatttaaacttctcttctttcttaaggttgtgaaattccaaactgattttatgtgattttgaaaagtttagaaccagtgctgagtctatgtggagggtttatattcctatgtgatatactgttattaatgcatgtggtgccatgcttgtctttaaatatataaatagtgctaaattgcaaagtcatatggagctttggatttagtttgacttcttactactgctttgtctgctatattcaaacccaaaggcattcccaagctagggagataaaaattaattttctaaaatgtccacatcctatacattttgcttattcatggcatctttcaaattttattttagtttcctttatttgccaagaatacatatggatttgaatttttaaggagagaaggaaagggtaggaaaccagggccttgggtttagtaacaggcattggatgtctattaaccaactattcttacgctaatggctttgcagctcctattctcccatttgatcctcaaacaattctattagagtggtatttttatccaatttcacagattaaaatataagcactcaataaaatataacctttagaagcttaaaaagctagtaagtgatgaactgaggatttgaacccatgtttgtcaccaaggagctttccagggcacatgtcataaaattagagccaactgcagagctgtaagggaacttttagagatgaacttcttcagcctccatattttacagaaggaaactgaatcccagaaggagaaattgccgttctcaaggctccctggatgggtaataacacagatatgagtaggtcacataaagtatatcttttttaaaaaaaagaaattcaattatgtcttatttggggggtatatttcccagaagatatttttctggcatgtggtctgtaaacacagcatgattcatattttttatgtttcatgctactcattttgtttaattaccaacaaacatggggactttggctttttgacttatttgcaacaagcatgaaattgttaaatttaccttttatcaattgtaatcatcctatgccaacatattatcataaattcatagaaatatttttaaaaataaataacagacattgaaatccaattcttagataatactcccagaacagccaatggtaaatgccctatacttgagtcttacttagatgctgtggtaatgcaccattttagaagatgaatgatactgctatttctcttcagggaaacaataatggataaagaaatgtaactgccgggcagcaaagcttctaagtgaaacctgtagtagcagtagtagtagggagaaaatgtgtagtcatcaagtgaaaataggaaaggatctatgatttatgatgtcttaatagaccctaaattgttctttaattacaagagtggcagtctctgaagtcatttgtgagcttgtatgacttttgtatttagcaatgttgcatgctcacataattgaaaattaaaagtaacacatttttctgaaatgta

SEQ ID NO: 10 - DNA, 19420 bp, Homo sapiens
  source 1..19420: mol_type = other DNA
actggccctgtccttccatctgcccagagaggagcatctggatcaaggtgctggccatgtcccagctggtggaatgcgtccccaacttttcggaggggaagaaccaggaggtgaggcccgaggagctggtcaagcatctagggctgatggggcagcttgagtggctaaggcccaggccatggaggaggtggtgggcttggtgtcccgggtcgtcttcccaggatgggcagagccgctgcccgtgggccccaaggacatcccgtggctcagggccctggggagtgcctgacccaggggtgggtggaacacgactggtgcttgtgggggctgaggcttggctgtggcttcaggggcctttcgggtgctttcggtggggggttgggcagatctctgggcctcaaagggccttggtgctcccccctgaaaatggggctcctgccactgactgaaagggctgtgtgaggccacacgaggtggcccagcatggtccccactgccgcctctccatctccactggagttagcttgctgagcccccaccctgcagccaccatcctcactggacccaaaacgaagtaggcacagagggggcagcaggcccccaggtccggcctctcgccttccacagccctgaggtccaggctcctccgggaacaaacgcaggccctaagggccacctggaaggcctcccagagcgcagcaccaggccacaggggtcacccgcaggggtgcagggaggcctcgtcatgccgggattccagccagcaccaaggccctgggacagggcaagatttggggctgagcccctgctcccagcagtcctgccacccggaaggttctaggcccttcaggcccctcccccatgctggtgatctgtccctcccctgctcgggggtgggggtcccggcccctctgtgacctgcgcctgtggtcaccttcttggatccccggccacgtctctggcatctgtctgtcggagcagagcccgtgagtctctcctggaggcaccacctgcagccccttgtggggactgtgcttgggctggagtgactgtggctgctgtgagggttcccgggcggccgctgtgtgcgggcactttcggtgggagctcagcttgtcggagagcccccaaaggcttggcccgcctcctcagcccccatttgtgtctcggggtgcagccacctccaagctccttttccttctttcaaacggggagactgaggtgtgggggccgggcctgtgtcccaggtgatcgacgccatctctggagccatcacacagaccccgggctgcgtgctgctggatgtggacgcaggcccttccaccaaccgcaccgtgtacaccttcgtggggccgccggagtgcgtggtggagggggccctcaacgctgcccgggtagcttcccgacttatcgacatgagcaggcaccaaggtgaggtctctgggctctcctgtggctgccgtgtctcagaatgtcagggccgagccctgtcctggtgtcctgggagagggggtaggcccggggcccaggcttggaacgtggggtccagtggggctggctctggctctcctaggaggaccctggagtgtgggggtcatggcccccatcctgcctgcagggctgtgctctgggggacccccaggtcgccacgctcccacagcaccgggccaccttcacggctgggtggggggagggggccacgccggggaaggtttgtgggccccgtccacctgcccactcgtcaagggggctgagagccagtcttggagcaggcactggtgggggaagggctgcctggaagctgacctgtcaacagcccacaagccaaacacctcggtgggcaggcagggccaaaggtgtgtggacacacgggcgctggccaggggctgggctgtgggccgctcatgagaggccagggatccacagtgatcctgaggggtggatggatgagaagcttatctctaagtggccagccctgggcggtggcggcaaaggcgggggaggctggcgtcccctggggtgggcgccgacccacggcttggtgtagccacagcgagggactcagctagtgagaagaatgctctggaaacgcagagtggattctcggcttcaggggagggggttggggtggccggaacccagcctcgagcgccccctcttggcctggccggggctgcctgagagctgagctttgcacccctttcaaagttatttttgtgagtgttaggagagggacaggtttatcccagagatgccagaccacccgctcaggtgctgctgctcctgggctgaaggacctcccccacactggctgggaggacggtgcgggaacttccgttgtcccgggagggctggtgctgccgctggggcagggctgggagcgcccagggccggcctcctccctgtgggtcagtgtgagcagcttgctgggtgtgtggactgggggctgcccaggccggagaggacagagggtccgagaaccccgtggagctcccacccgctcccacacctggcctcctgcccggcctcgccgtctctctgcaggagagcacccccgcatgggggccctagacgtctgccccttcatccccgtgaggggcgtcagcgtggatgagtgtgtgctctgcgcccaggcctttggccagaggctggcagaggagctggacgtgccaggtgagcgtgcccccccgcccccctcactctgctcccgtctcattggtgtgggttattggctccttctgtatcccccagttccctgcccttgactgctcttgcaagggcagagtgttccaaaaagccaacatgcagaagcgcagctccctcaataccgaaataaacgcagcctcgcctgcggccgtgcaggcccggggcctcctcagactacaccgcagagcagctgcacaggcaaaccaagagccttaaagtccacgccttctagagcagaataatttcactttgggaaattaactaaatcaagaaaatgatatgaaacaaacagagacaaacgggacaaagtgcatacccacccctaggctgcaccaacccagcgctcctggaaagaaatcccgaggcagggacgtaggtcacagtcacgccagcgtgcagggcacacgtaacccccgtcacggtcacgccggcatgcagggcacacgtaacccccgtcacggtcatgccagtccccccgaaggaaatcccgacgcagggcccacgtcacagtcacactggtgtgcgggttcacgagtttttcctcttctctgccgttatatttatgtggttgcttgcggttctgtttatcatacaaagaaaacagaagcatgaacgtcctgccgttagcatgtcccacatgttccatcctaaccctgcaattcgccttttcagggccctctgaggagggggtgggcaggggtgctggcccacactgagggtccactgggaccacccgcatccatccaaggcggagaacgggcactccccaggagagggtgcagtagaggcccattcctgggttaggctggagggagcccctccacctgcgtcctccaggaactgagtcctggaccccctgccggtccaggcctgaccgccgggctctcctgcagtttacctgtacggcgaggcagccaggatggacagtcgccggaccctgccggccatccgggccggggagtacgaggccctccctaagaaggtgcccccaccccgggcggtcgggcctgggaaggaggtggacctgcccctttgtcctggctggggtggctgggccgggcccctccttcccgggaccccggggggctgttccctcccgtgggggatgtctcaccccagagcgaacttgctcacagctccagcaggccgactgggcgcccgactttggtcccagctcctttgtccccagttggggggccacggccacgggggcgaggaagttcctcattgcttttaacatcaacctgctcggcacaaaggagcaagcccaccgcatcgcgctcaacctgcgggagcagggccgcgggaaggaccaggtgaccccgttcactgaccccatggagccccacccagcccctcgggaaagggttagaggctgagagcctcaggcggggaggtcggtggggatggggcaccggccggacagggttcggcctcccacctgcagaccggcccagcctccgcgtccacaccgtgcggggaccgcgcaggtcggcaggtcaggggcggagtgaagctggggagctctggcctcctggggattttccagggaacgaggcaggacttccctttgttaacatgtggcagcatttccatactgctgggaaacagcgacttccggagtcccaggtgccctcaggggccccccatatccctccagatgccttgggagccccgacacccctacaaaccttcaggtgcccccaggcctttccctccacgtctgcacagcagtggtcacccggtctgagcgtcactccgggtatagatacccggagaaagcgggggggaccacctgcccatctgttccccactcagagaccccggtcccacaaacagccaaggtcctgggacccggcttcccgacctgcagactcagcacaaaagcacagggacctctaagtcctgctttaggccccggccaagggcagaggtcagagtccccccacgtggactcagtcaccccgacaagtgcggggctgaggggacttgtcgggagcggagcagatgggatgggagaacggcatgggggtgcctggggccccacccctcagcattcccccaacatctaggacacagcgtggctggaaggcagggcctaggctgggcgggggcctgccggggtgggcctccggtgtctgacccttggggcctccgtttccctgtggcaagcgaagtttctctggccctccccggccagctcagtgagggacggaggagaaccacagcacccacccaggcacaggctcctccccgtccagctggggaatgcaagtgccaggagagactggcagggccaggcaggatgagcttcctagtccaggctggggaacgctcttcctttgcagccaggacgtctgaagaaagttcagggcattggctggtacctggatgagaagaacctggctcaggtgtccaccaatcttctggactttgaggtcacggcactgcacacggtctacgaggagacctgccgagaagcacaggtgagcccgggagcagccgctgctgctgtgaggggcgagccgatctgtcccgtgggcagggcgggggccccacatcctccagccagggccattctccagccagcccccagggggtgacgctgcctgtgccttggcaggagctgagcctcccagtggtgggctcacagctggtgggcctggtgcccctgaaggctctgctggatgcggccgccttctactgcgagaaggagaacctcttcatcctggaggaggagcagcggatcaggctggtgggccgggctgccgaggaagggtcggacaggggcgtgcagggagggtggggaggcggtggcggagctcacagccctggggcgcagcttccctccccctcctcccccttcattttattgacttgtgttcagaagatgagatttcactttttattttggacaccttattgaggtttttttgtgacctatgatatgctcagctgtgcaaattccacggagaggacaccccaccctttctgcttggtcttgcctcctgggccggccatgctcccgtggaggggcctgtgcctcctctcaccacctccatcggggcgtcctgcacccctggaactggcagctcatggatgtgtgtgcctttagctatgggacttagatccccatccacggagcggctccttcagaaagtgattccttttgtcttgtggacacctgggcctcaaggcttctggagtctgggttccaccggggcctcaggtcctgctggggtgtggcagcgtctgcagagccgctgtccgccttggtctgtcctttcactcgaggtcactgcagagccgctgtccgccttggtctgtcctttcactcaaggtcactttgttttaggtgtgtttttcgcaataagcacaatccacttaactggattttttggggacgttttgtctgtttgtgtttttactgatttagctctcgtgacttgtggattccgtccttgtttagtctcgggcatattttcttctattagatcgctgacccagttatttagttctctagctgtaggaccccgtgatgctgcagcagctttgatgtcttctctgcctccgtctttactttctcttccactcctttcctctggattcacagtggttttccaaaacccagcctcaatcattggtgcgtttgtggccttgtctgttgtattcttggctgttaacaaaattttttgtgactttacattttgtataatttcttacagagaagatacaggtggccctccactcctgcctcccacccatattttccaagtgcttgcattttgccccatttatttgtgtataatcatattatatttttttccggactatttaaaagttgggttgaagacattgtactcttttacccctaatttattaaggctgtgtttcttaagaacagggacattctcttacataaccacagtgtaattatcaaaatcaggaaattcaacactgatacaatcctagtatctaataatcctcaggccataatcaaattgcttcagtgtcccagtgattcccatcatagcgatttctcctccaatccgtgatccagttcacgtaacacagagcactgagccaaccttttctcctttcttccaactgttcctgtcttccttgtccttcattgaccttgacatagtttcaaaggacagacttttaaaagcgcctcagtggggactagtctgatgttgcttgtggccagatgtagttgtgcatttttattttaatttaatttgttacttcttttgagacagggtcttgctctgtcacccaggctggagtgcagtggcacaatcacagctcactgcagccccaaactccagggctcaggtgatcttcccacctcagcctctcaaagtgctgggattacaggcaaggaccactatgtagtcctggctaattttgtacagatggggttttgctctattgcccaggctggtctcaaactcctggactcaagcaatccactcacgtcagcctcctaaaagtgttgggacgacaggtgtgcaccaacacgcccagccagttacgcatttttggcaggaaaagcatagatggtattgtgtcctcctcagagacgccgactccccatgatgctcattttctcagggtgccgacgtggacccgtcacttgccaaggcgacccccttcctcctggacccttcactgcaatgttactatttttccttttgcaattaatacgttgtggggagtacttgaaggtgtttaaagtattgagtaggtaaatacctgtttattactgaaattccagagttttaggagccagtgacagcattccaacgtcatcctttctgtctaagcagcagctgtcgcttctccacatttccttgtcttcttatgtgtgaggccccgtctgctttccagtgtggcgttttgtcttcttcttttttttttttttttttgagatggagcctcactttgtcacccaggccggagtgcagtggtgtgatctcggctcactgcaacctccacctcccggattgaagcagttctctgcctcagcctctcgagtagctgggattacaggcgtgtgccaccgcacttggctaatttttgtattttttttttttagtagagacggggtttcaccatcttggccaggctggtcttgaactcctgacctcgtgatccgtccgcctcagcctcccaaagcactgggattacaggcgtgagccaccgtgactggctggggttttgtcttctttacctgaagggccccatgcctgcggcctgcacaggtctggctgtgcccgtggctgcgtgctgcctccttgtggtgaggctgctttgctttgtgttgtgtgatttttgattgccagtgcatgctctgtggaattttatctatggtaattcttggacacctgggttcaaagttttctcctccaaggagggtttgtgctggcgcttgtggacactgcctcacaggaccccctgaagctgagtttttggcttggagttctggaaccacacaagagtgaattcggtgtcgggtgaggcctgcagccctgtcagggtggcttgtgattaggaattcccaggagatttttttttttttcctgcttcacccaaagggaaggcagggactgggaagtacctcaactgtttcctctggcgggtggctgtttctaattcatccttgggggtgtcaccttccaggggtctccagtcggaccccactctgaaggccccagacctcccccactcatcaggggctgccagagaggggcagttgcccccagggcagacccagctccaggctggcaggcctttccggactcgtctttctggtcgtgtctggtttcgaatgatgtcctgtctgctagcttagccaggcctttaaaatgcccggcatcttcctggggttttctgcggaaggaggctttgccttgtggcttgctggttctatgccacggggaggcactctccaccccgcccggctgctgtccgtctctgtggggtggggtgggggtcgcatagccaacgtgttctgaatgggtttcccagaatgaattctaatcttaaatgggactgtcacaactttattttgaatttaggtaaaactcacttttgtggcatacaagtttatgtgtgggtgacttggggctgttcctcagcttttgaggacttgttagatgtgaagacttggtgaattaaaatctttcccgcccgtcagcgatggggcagtggtgctggggggcggcgaagcatgagcagcagtttgctgaggggtccccagggggcaactcctttctctgggcctcaggttccccaagggcaactcagggtgatggctgtttccagaagcctgtacggggtgcctgctggggcggggcccacagggctcctggcggggcagaggtggggggtgccagccacgcccctgccctgctccccgcaaaagcacctgtgtgctcggggcagggggcggctgccgcaagggtgggacccgcgggttccgaggctttcctggtggtggagacgcgccgaggccgtttccactccaagccccttttccaggtggtgagccggctgggcctggactccctgtgccccttcagccctaaggagcggatcatcgagtgagcctctgccctcccgccctcttctcacccctcccgggctctgcctctcgggccttgcggggcgctggggtccctgcgtggagacccggctgagtcctcccagcgcctccctttgggcgcctactcggcctgcgccaagccggggtctgggggctgaggggggcacagagaccccggccgggtccccgcaggttctcagccgagtggtcacctccccgtgggtgcagacgggcgtggggcctggggccgccccgggaggactgcgctccccccaccaaccccggccagacccgctgagccgcgcccaccctgcaggtacctggtccctgagcgcgggcctgagcgaggcctgggcagcaagtccctgcgcgccttcgtgggggaggtgggtgcccgctctgcggcccccgggggcggctcggtggcggcggccgctgcggccatggtgagcgcggggggaggggcaggggaggcgcagttgttggggggagggcggggagggggaagggcgctgttggggggagggcacggggtggggagggcgcggtggggccgccctgggtggagacgtgggggccacacgggtgggacccccgcagggatcacccgggcccctggctcttcctggggtcggtcccgggccgtctggggtccctgcgacccccacatccacccctctcgcagggtgcggcgctgggctccatggtgggcctcatgacctacgggcggcgccaattccagtccctggacacgacgatgcggcgcctgatcccgcccttccgcgaggcttcggccaagctaaccacgctggtggatgccgacgccgaggccttcaccgcctacctggtgagtggcggccacagcagggctccccgggccccaccaacagcgaacccccagctggggccccagtgagaagcgggtcagcctccggctggggaggggctggggaccaggaggggcctgagggcgtcaccactggccgctgtctggaccttgaccaccagcaccgccctcaccccggcaagtgcttgggcccagcagggtttgagggttcggccagggtgaccccacattcacaggccatggcagccggtacaagggaacaggcccctcccagcaggggagccaggagcccaggcttgggggaccccacagacctggagcaaggcagggcccttctttagaagcctgcaattccaggaaaggaggcctgcaagaatctcaggaacacagtgatgagtgctctcaggcaggccagagacgacccgtttcagccacagcataagacagaaacaccatcttcagataacacccactcaggcaggcagtgaccccacctccctccaaacgggacaggaacatgagcatcagctggcaggatgtgcccacagatgggtgctgggtgctcagagcctagggcaggggccagagagcctgggaaagggcagtgacaaggtcaggatgctcccaagcagttccagcccaggagaggacaggagggaagggcagaaaagagagagagagggaggggagagagaagagagggagagtggggagagaggcagatggcggagagagagagggagggagggatggggagggagggagggggaggagagggagagggggagagagggagggggagagacagagagagagggagagggagggagagagggagggagacagagggaggaggggggagagagggagggggaaaaggggagagagggagagggggagagagggagggagaggggaggagggaaaggggagggagagggggagaggggggagagaggggagagagggagagggggaaagaggggagggagggaggggggagagaggtaggtggagagagagggagggagagagagggagagaggggagagaggtgtaggggccagccctacagggtctgtgggtttttctccccgtgtgtagagatgagagattatagaaataaagacacaagacaaagagaagaaaagacagctgggcccgggggaccactaccactaagacacggagaccggtagtggccctgaatgcctggctgcgctgttatttattggatacaaagcaaaagaggcagggtaaagagtgtgagtcatctttaatgattgataaggtcacgtgagtcacatgtccaccgcacaggggccccttccctgttaggtagctgaggcagagagagagaggacagctcacatcattttttttaatcctctttttagaaagattaaagactaatacttttactaagtttgctactgttatctagagggcggagccaggtgtacagagtggaacataaaagtgaaacaggagcatgagctctaaagcacagcatcacagggagacgattaggcctcgggataactgcgggtgggccctttacaagaggtggtggaccagagtcttcttcaaactcccctggagaaagggagactgccttttccgatctgctaagtagcggatgcttttctttggcactgacactaccatagaccatgctccgcttggtaacgggcgccttcccagacgctggccttaccgctagaccaaggagccctctagtggccctgcccaggcctgacaaagagctcacactcgttttttggtcactttttagcgtgccccttcaactcctatctgtgtatggcctggtttttcctaggttatgattgcagagcaaagattattataatgttaaagagtaattgctacaaactaatgattaataattatatataatcatatctatgatctatatctagtacaactcttgttattttatatattttattgtactaaaacagctcgtgccctcggtctcttgcctgggcacctggctggcttgccgcccacaagagggagatggggagggggggtagggagagagggaggggagtggggagagagggaggtggggagagagacagggagggacagagtgggagggagggagagagaaacatgtgccccagcctctggagcagggcggtgggggcgcctgtgtttctgggagggccacaagacccccagccctaagttgggaagtctaccttacaaggctgggtgagaaaggcaggccccaaatgcacgtggaatccacacacaggcacagagggagccaagatgagggcctcggataaacagtcccggatttgcagagggagtcgcctgagggtcccgttctggtcctgtggagaggtgaagctggctgggcttctgggtctggtggggacttggagaacttttctgtctagctaaaggtttgtaaacacaccagtcagcactgtgtctagctactggggtgggaacttggagaacttctctgtctagctaaagtattgtaaaaacgcaccagtcagtgctctgtgtctagctaaaggtttgtaaacgcaccaatcagcactctttaaaaacggaccaatcagcactctgtaaaatggaccaatcagcactctgtaaagtggaccaatcagcaggatgtgggcggggccaaataagggcataaaagctggccaccgaaaccagcaagcgccaaccgtggcgggttctgttccaagctgtgggggctttgttcttttgctcttcgaactaaatcttgctgctgcttactctttgggccttcgctacctttacgacctgtaacactcactgccaaggtgtgtagcttcactcctcaagtcagcgagaccaccaacccaccgggaggagctaacagctgtgctacgcgccacctgtaagagctgtaacactcgctgcgaaggtcggcggcctcacggggaggaagaaacagctcccgacgcgccacctgtaagagcttaacgctcactgtgaaggtcggcggcctcacggggaggaagaaacagctcccgacgcgccacctgtaagagcttatggctcactgtgaaggtctgcggcctcaccgggaggaagaaacagctcccgacgcgccacctgtaagagctcactgagaaggtctccggcttcactcctgaagtcaggcaagaccacgaacccgccagaaggaagaaactccggacgtatctgaacatcagaaggaaccaattccggacacactgtttgcagggaggtgtagacgctgatcaccgtttccagtcattttaaaaattcaggttttatttatttactttttacagtagataggcccttcgggggttcaccccgccttcgccacagcccgcccagtgctcgcctctcttgctgcctcagagctccgcctttccttcccctcgcacacagccccgcccgctcccagcctggccccttgggttttccactgggggaagcacccccctccccgggggggcccagggcacccaacacctgcttgcagaaccctgctttctgggatgcgcttctcattaccgggcaggttaagcatgttccgtacatttagcagtggtttttacttcttttccaggaagttatctggtgaatattttttgactccttttatcttagtttctcttggggctttcgctgccttctagtattttttttttttaataggggaggcaggccttgttctgggctcagctttccccgtttgttgttcgtctttggactttgcgtgtggggcttctgacaatgactcttaatctttatgtcgtggaatgtgtcaatcctgactttatattttttgggtcttgtatcacagttcaaatggcctccccagaacaagatgatcttttctatactttaatgggttgatgaactttagacccggacaggcatttgaagacagtcatgaatttaagtataaatattagaaataggccaggcatgatagctcacacctgtaatcctagcattttggaaaaccaaggtgggcaaatcccttgagctcaggtgtttgaaaccagcctagaccacacaccaagaccctgtatttacccacccaaaaagaaaaaaaaaaaataaagccaggcgtggtagcaggtacctgtggtcccagctactcaggaggcttaagtgggggtagcttgaggccaggagtttgaggctgcagtgagtcgtgattgcaccactgcactctagcctgggcaacagaacgacaccctgtctctaatgtaaacatatgtatataaaacataggaacaattttatgtttagaaatttaaaataaggtgaataattaaaaaacaagtaggaaaagtacatagatgaaaatgtaatcaagggacaggaaggaaacaagacgtgtggtttagagaaccatgagcggggacagtgagactgtgctaggcatcagtggtcgaaatcagtggattggtttacgctccctgtgagccacgtgaaggtggacggggagtgctggattggtttacgctccctgtgagcaatgtgaaggcagacggggagtgctggattggtttacgctccctgtgagcaatgtgaaggctgacggggagtgctggattggtttacgctccctgtgagccacgtgaaggtggacggggagtgctgggttggtttacgctccctgtgagcaatgtgaaggcagacggggagtgctggattggtttacactccctgtgagccacgtgaaggtggacggggagtgctgggtgggtttacactccctgtgagccacgtgaaggtggacgggggagtgctggattggtttacactccctgtgagccacgtgaaggtggacggggagtgctgggttggtttacactccctctgagcaatgcgaaggtggacggggagggctgggttgatttacattccctgcgaacaatgtgaaggtggacgaggagtgctgggttggtttacactccctgtgagccacgcgaaggtggacggggagtgctggattggtttacactccctgtgagccacgtgaaggtggacgggggagtgctgggttggtttacactccctctgagcaatgcgaaggtggacggggagggctgggttgatttacattccctgtgaacaatgtgaaggtggacggggagtgctgcattggtttacgcaccctgtgaggcacgtgaaggtggacggggagtgctgggttggtgtacactccctgtgagcaatgtgaaggtggacggggagtgctggattggtttatgctccctctgagcaatgcaaaggtcgacttttgaaaaacataaggagatatctgtaccttgcaccaaatacataagtaatttccagatggaatagaaaactgtatttccccaccaccaacacaaccaagcctcacgataaatcacagaaaacaaaacggaccgggcgggcaggcctcggccggacgcagatgaggccacctaaagcacacccttggccaagatctgcccagggagaccatggacaccgcaaggcctgggtgtgagagagtgttcgtagcgcgagtcgcagcttgaggatggctgtcctgcctccgcctgcaactgctacagacccttgtgcagaggacagcctgggagaggggctgcagccaggaggcctggtctggatgatgccccagccagtcagggagacactgggcatttctgttcctcgatcactgctgtcggaatggtcaaaggatccagatctggctggcgcccagggagcatttgctctcatccatggtcgagggtaggggctgttgatgatgactttctggtggagagttggctgaatcttccaagatgaagtgagcatattccccactgagaaccccttggccagggctctggccacagtccgtgtgagtagggctcccagtgggtccttggaaggttggtgtgtggtcccagctgtgctcttccacacggggtgggtccgaggagccgagtgccttacggtgacgccgtgagctacacacatgagcacctaggaaaggccagtgcctgtgaccggggcagggacatgaggggctttgaggtttgctcttggtccttctgcacagtctgagcctcttatgcccaggcttgggggcggtgcagctgcttgtgttggagacacaggcccagagccactcctgcctacaggttctgagggctcaggggacctcctgggccctcaggctctttagctgagaataagggccctgagggaactacctgcttctcacatccccgggtctctgaccatctgctgtgtgccccgaccccccctaccctgctcctccaccaagcctgatgctaagggctataaaccactggcccaacagaagcttggttcccagagaactggtccctgcctgggacatgctccttgctacagccccttgtgggagctcagagggcatggctgctccccctacggtccctcgcccagtggttctgtctctttatggcaggaagcaatgaggctccccaagaacacacctgaggaaaaggacaggtgagcctggagggccggccgcaccgtgggcctctgtgtctggggagttggtggccaggatcccgagtacctgggtgctgtgacggggcgtggttggcctgggcgtgctgggtgtttgggaatgacttcccatcgcccgcttctgcagcctgctcagccctgttggggtgcagtgtgtccactgcctgcctgtgtgtgccgctgtgctcaggctctcctcttgctcctttcaggcgcacggcggccctacaggagggtctgaggcgggcagtctctgtgccgctgacgctggcggagacggtggcctcgctgtggccggccctgcaggaactggcccggtgtgggaacctggcctgccggtcagacctccaggtaggggggcccgggggaccccaggcctcctgccgcaaagcaggaagcagctgttggggctgagttgctggagagcacggtggttggctgggctgagccaggtagggagacctcacttcacgggcagttcccggggctttggcctcctccaacagggccggggtgtccgctgccttctaagatctcgctcacggcggcaccacagacggagacccaaatgtgtctgcagagcccaccctgaccactgtataagtgtatactcccccaagaccccttgtatcacccccactgtcttgttctagaaaacacctatgtcagcccaggcacaatggttctcgcctgtggtcccagcactttgggaggctgaggcgggaggatcacttgaatagaggaggtcgagaccagcctgggcaacatagtgggaccctggctgtacaatagatacatatgagccaggcacggtggtgcctgtggtcccagctacttgggaggctgaggcaggagaattgcttgagcacaggaggtcaaggctgcagtgagccgtgatcacaccactgcgctccagccttggtgacagagcaagaccctgggtcaaaaacaacaaaacacgagaaagcacacaaggcagctcttggaagtagatgcctcacactgacaggggccacagctgggcagagggtcccagagaaggagcgtctctctcatgggctcagcactttctgcagctgccctaagacctcatggtcttcgggttctttataggaaagacgcctcttttcagcatctggtcccagagaagtgtcccctcagtccctgggaagtgtccctgggcagtgggcgggccgttagcctgaagctgcctccgggggccctccaggggatgactttgtctctagaactgtggtcctggttcctagagtggcggagagcctccagtgtgactgctcccaggcctcctgtggggctgagccctgcttggataagagaaagttttgttttctaagctcagtggtggggcttagccctctgtggggcgaaagcgggggctgcgctgggctccttgtgaggaggaggacgaagtccggcctgtcccagagcccgtcaggcagagaccctccttccggcagtttgctcagccttgatccatgtaggggctccctggggtccttgcaggtggcggccaaagccctggagatgggcgtgtttggcgcatatttcaacgtgctcatcaacctgagggacatcacagacgaggcatttaaggaccaggtgagcaggaggcaggtgtggtgcccggaccccacgtgggggcctggattcacagcctcagggtgattgccgactggctgtgggcagtgggggtcggaggttgctgcccagcaagctgggctgaagactggaactaccagacccctctttccctgtgtccatcagatccaccatcgtgtttccagcctcctgcaggaagccaagacccaggctgcactggtgctggactgcttggagacccggcaggagtgacggtgcgggaggcctctccgggctctgtggcccctccctcgcccatccccagagggcagagctgtgacctcggtggggacacagcttgttcgtgtggggcccggagggtaggtgggcaggcagcggggcatcgcctgggaatggaggcgctggcagggacagaaggcccctagtcccatgtgacctccagtaaagttttggcaccaaacctgtgttgtgtgttggcggttttgggggcagggctgagagctgagctgcgggtcttggggcaggagcaggacatatggtcagtggcccatgggagccagggttggagggaatggggttgcagcgtgaggagacagacctcagcgccagggtccccagacacccagtgcagcccacagtgggcagggtcacaggtattcagaggacctggggttcagtgcaggtccctgggctgtgaggccccttgtctgagggaaaggggccctggttctgtgcatgggacagaaaccccagggacagcaggaccttcgacgctggaaggatagcctcgcttcccaggtgcagctcccggcaggtctggacagttccacagagcacggtactggccctgtcctcagttcccgtccacccttcaaccagtggctcctgggagacttttcctccctgcctcagctccctgcccagccagcctcctgtctccagagaagttctccattaaaaaataatttagcaaatcactatactctcaaattacttctagatggactattacatgtgacagatgatgtatgaatgtatttgttagtcagcactgcaggatattaaaaagaagattactg

SEQ ID NO: 11 - DNA, 36152 bp, Homo sapiens
  source 1..36152: mol_type = other DNA
gtacctccagcgcgcgggttaaccttggccgtgggcagggcggggtctttcgccgtgtggtgcctggagcccggacccaccccttcccgaccgcgcctctccgacgctcccgggacgcaccctccccgcggcttgcaaggtggacccctgggggacacctggcgcggccacctggggccacctttcccgcctccgctccctcgggaggacgtccattcctctttgtttgggactgcctcagccgcagtcagcgaggctggtcacagacgcggcccaaaatgaatgcaaatagtttggataagaaaatcatttcacgttcaatcccaatgcagaactacagacctgtcattaaaagtgccgcagctgtggactcagaacaattgtgtttgctcctcgcgcccattattagcattccaatcgtttaacatccacccgagatgaaacctctttggtggtgttgcttgtttccgtccatgctctctgacttccttttttattttcctcctccccataaaacaaacattctgcctcttgccggtgcaaattgacttggcccaaaatggagaaaatgatcgcttggacacggctttgggcagcctgagctgctgttttggattgcttcctagccctctaaccacaccccactgcaacagaccagtagcaagatggtgagggaattaaattctttgcacggatgcgctggttttcggaaacaatgccgccaccatccccgtttccaaatctgcccagaactgtaaatccaaatgaagattcaacagaataaagaaaatgtgtgcttcttgctagctatcaacaaaactactttgtaacatgtcagcatttaagctttctacagttcccttttgcacattgccactcgtctgtgtggatggagctttgtgttgctcagtccgtagagttagggagcaggcaggcgacagtggttaattacaaagagttaatgtggtgattggtgaccatatttcagcctgtcgttttttgctagtctccaggctgcaatcgatatagctgtcaaatgaagttataccaagaaatgaagacttcacataatgcaggggtgagaggagggaataaatcttcatataagagcaattctcggccgggcgctgtggctcatgcctgtaatcccagcactttgggaggccgaggcgggtggatcacgaggtcaggagatcgagaccatcctggctaacacggtgaaaccccgtctctactaaaaaatacaaaaaattagccgggcgtggtggcgggcgcctgtagtcccagctactcgggaggctgaggcaggagaatggcatgaacccgggaggcgaagcttgcagtgagccgagatcgcaccactgtactctagcctgggcgacagagcaagactccgtctcaaaaaaaaaaaaaaaaaaaaaagaacaattctcaaactttttattctcaggacccctttacctttcaaaaattaccgtggacctaagagcttctgtttgtgtggtatatctgtctatatttaccatattagacattaaagctggaaaaaaattaaagtagttgttaatttacaaaactaataaataggctaggtgcataaatagtgattttaatgaaaaataactattttccaaaccaacccccccgccccccaatcagtgagaagattaacattgtggggttttttcccttttttttaaaattgtggtaagatataacaaaatttaccattttgataatttttaagtgtacaattgagaggtacagccaacaccactgtccatctccagaacttgtcatcatcccaaactgaaaccctgtacctattacacaataactgcccattacttcctcccccaatccctggttaaccattattttttctctatgaatttgagtatttcaggtcccttatataagtggaattagacaatatttgtccttttgcgtctggtttatttagtatagcgtttttaaggtttattcgttttgaagcatgtgtcgggatttcctttttaaaactgaataatatttcattgtatgtatataccacattttgtttatccatttgtcagtggacatttgggttgcttccaccttttggctattgtgaatactactactatgatcattaatgtgcacatgtctgtttgaatccctgcttttaattctttgggatactgtatgtacctagaagtgaaaattgctgagtcataggatagtactatgtttagtttttgaaaccatactgttttcttcagtggctgtaccatttttacattcccattggcagtacctaaggattccaatttctccacatcatcatcagcacttatttcctggttttgataacagttatcctaggagtggcattgtttcttttttttttctttttttttttttttgagacagagtctctctctgtcgcccaggctggaatgcagtggcgctatctcggctcactgcaagcgccgcctcccgggttcacgccattcccctgcctcagcctcccaagtagctgggactacaggcgcccgcaaccacgcccggctaattttttttttttatttttagtagagacggggtttcatcctgttagccaggatggtctcgatctcctgacctcgtgatccgcctgtctcggcctcccaaagtgctgggattacaggcgtgagccactgcgcccggcagaagtggcactgtttcgcatttttgcaaaactaatgtgtgacataatagaaggtaactggattcttatgtctgcctctgcatttaagctgctgcactgtttcattttggtttaagatgaagaaaatcccacctcacagtcatatgaagttggaaagaagaatattttaatagctttttaaagataatcatggatgttctttgatatcacatcaaagtttgacaaatcgtagctttttaaaggttagttacaaagtggaatttgaaactatatcaatgtacttgttttacactgttacattaatatccaatggtgtaccttacactttgaatggatgttgaatccatgcctgttttttaaaacattaagcataagtccttcggaaattttagtggttcactgtgttatacagttcttcctaatgttgacatatttcattatacagtatcaaacaatcactttccttaatgtcttcctatttagtcggaaaagtcttcaagtattgggaagctgtcaagctcacagtggcagataggattttccaaaattctagttttcacttgaaagctagaattttatcattggtaacacaaactgtcagttgttttacttgaagtgacaatctcactttgttacatttttgacagaatttctgccacatacttaagtctgaataaccctggtttgtctgtcagtagtttttttctggtaaaaatggtgttccatgggctgggcacggtggctcacgcctgtaatcccagcactttgggaggccatggcaggtggatcacgaagtcaggagatcgagaccatcctggctaacacggtgaaaccctgtctctactgaaaatacaaaaaattagccgggcgtggtggcgggcgcctgtagtcccaactactcgggaggctgaggcaggagaatggcgtgaacccggaaggtggagtttgcagtgcgccgagattgtgccactgcactccagcctgggcgacagagcgagactccgtctcaaaaaaaaaaaaaaaaaaatggttttccatgaaaaaaatctatttcagctcacagttcaaccaattgcaaaagtgcttttgatttgggcaaccaaatcctcaggacaacccttatactcaggtacacagcagaaatgctttgtgtgtacttggtcacatataactcaaaggtagagatttaataaaaattcatactttttaccatttcattaaggatattctaaaatgaaattgacattatttttagcctgagtgcatggcaatgaaaaatatagctactagtatagtttggtgtcattgcctcaatttgtgctgaagtaccaacagtattatccaccattccttttcgccatcagtgcaaatgttcataaagtaaaaaggataaataatgtcttagtattgttatgaaagatttttaacctcacagattccttgaaagtgtctcaggaacccctccccatacctctacctttaaggtttgtggactacattttgagagctgccgatatgtggtattagattctttgtttatgcatggaagaaaataaatatactaatagccaaaaaattattaccttgttagaagctaccataaatatattaactaatttgttacataagggcatatcttacagttaatcatcatatatggtagtccttaacccagggcttccttgacttaatcacagaatctgctctgtttcaaaatcagtatcttccaaaagagttcatattagacaacatggaggaccccctgtgttctcctgtttttcctgtttcctctgacacttgggagttcattttagtgttatggagtaactaggcttttgcctaactgacttacagtttccattgggttttcttgttggcagagctgctatatccccttcccaaggccagcttccagctaggatcattgattggggtgttcagccaacttcttgggaataagtggactgagaatctggagtttggattatagttgctgttcaattcactttgtgaccttaaaaaaatcactcactcccttggacctctttcaagttatgtacctatgtatgtatgtattttagagacaaggtctcactctgtcatccaggctgaagtgcagtggggcatgatcatggctcactgcggtctcaaactctggtttcaaacaatcctccctgcctcagccttctgagtagctgggactacaggcgctcaccaccatgcccagctaatttgaaaaaattgtttgtagagataggatcttgctatgttgccgaggctagtctagaattcctggccacaaatgatcctcccatctcaacctctgaaagtgctgggattacaggagtgtactatcatgcctggcccaggttccttatattgtaaaatgaaaaggactagactaaataatagctaaggccttaaaaaaaaaacaaaaagcaaaaaacctctatattgccatagcaaaccaggagaattcctcctcctacctcagattgtacagcatgtgacccaagcaaagcctaatgtatattatagaataagagggatgagtgacatggtcaaagaaacaaacgagaaggttgactcaacaatatttagccgaaacaatagctgtaatagcctagcttcctcttgcaattagaaaagacagcttggtttgttttttggtttttgtttttttgagacagtctcgctctgttgcccaggctggaatacagtggcatgatctcggctcactgcaacctctgccttctgggttcaagcaattatcctgcctcaggctcctgagtggctgggattacaggtccccacaaccacgcctggctgattttttgtatttttagtagagctggggtttcactatgtgggcctggctggtcttgaactcctgacctcaagtgatctgcccacctcagcttcctaaagtgctgggattataggcgtgagccactgcacctggcctaaaaaacacagcttggttttttaaaatgatgacagcaatgcgtgttcattattgaaaacttagcaagtaatgacaagcaaaagaaaatattaaatatatatataatccagccacctggaacagccaattcttaacagctttcaaaatttcctctatgaacagactttctttttataaatatgatattgttattcttttataatttttaatattatacaaacatcccctaaaatataaatagctataatatattccttttggggatgtatgcaatttgattaatatacgcctttagaaatgtcaactattcccaacttcctgcaatgagtaatagtgcttggataaacattcctattgtccttttccaaatctttagttattttcttagtataaattcttacaaatggaatttgtacatcaaagggcatgcatacctttcaggtctttggtacttatcatcttattctattctaaaaactttctcccaaattataaccttaccaggtgagtaagtaaatgctggtttcctatactgttaccaacattgagcattttaattttttttatccttaccagtttgataagtggaaatttctcttattataatttgcattttcatacatttttggaaggtttattcagtgagtataattcctaaacaaaaattcaggagttgtggtctggaaaccaaaaagttatttgttgtctgatgtgaaaatttatttatatggaaaatcttagaaagtcagacaaattcaattacagttttcttggtgtttttgtttgtttgtttgagacagagtctcacttggttgcccaggctagagtgcagtggcatgatcatggctcactgcagcctcgacctcccgggctcaaacgatcctcccacttcagcctcccgagtagctgggactacaggtgtttgccaccacacccggctaatctttgtatttcttgtagagacagggcttcgccatgttgcccaagctggtctctaattcctgggctcgagtgatctgcccgcctcaaccttccagagtgctgggattacaggcatgagctactgggcccagcctaaattacagttattaataaacttaacaatatttacaggtctaagtgtaattaaataaaattgagattattcctctaaaaccagtaggcataatctccaaaatgttaagagaacagtattggggaaaaaaatctagtaaagaaagggttttttaagttaaagtatcaagagctaggttgacattatttgtacaaatggatttggttataaaataggttttcttttctttttttttttttttttttttttaggatggagtcttgcactgttgcccgggctggagtgcagtggcacgatcttggatcactgcaacctccgcctcctgggttcaagtgattctcctgcctcagcctccggagtagctgggattacaggcacctgccaccacgcccagctaatattttgtatttttagcagagacggggttttaccatgttggctaggctggtctcgaactcctgatctcatgattcacccgcgtcggcctcccaaagtgctgggattacaggcgtgaaccaccgtgctccgccgaggattgatttctttcttttttgtttgtcctttaaccctggttttggtcagaagcaacctggttctttctcagagttaaacattatcacctctttggttaagacaaagcacaggacttacttgggaagaatcccctgaattaaagatatgaagaaccaaggaaactgatgtgtattgaatacatatgtaaatgccaagctgccgcattgcaaagtgcatgtagcatcatagagtcgactatataaatctagaaacagctcgcctgagtttgaatgctggttttgccactgactagcattgtgatcttaggcaagaatacttaagttctccgtatctgtttcctcctcagtaaattgataattgattggctgatttcttcattcaccaaatatttattgtctattatatgcgaaatagtattcttggtctggggatatagcaatgaacaaagcagataaaaatctttgcattaatggaacttacattccagtgggagagacaactaaggaaaatataaagtaagttagatgggaaaatgtgctgcagagcaaaagtaaaatgggaaaggggaatgctcagtaccgataggaaggaaattgtagagtcaacaggaaaggctaccaagaaagtgatattaatacttgagtaatgatctaagagaaatgagcagttgtgctatgtgaatacctgaggcaggtcattctaagcaggagaaacggcacacaccaaggctctgaaagcagggctatgcctggtgtttttgagaaagtaaagagaccattgtgactagcatggaataaatgtcaggcaagtaagtaggagatgagacagggaaaaattggactcatccttttttttctattttcttctttttttttttttgttttattcgtttgtttttagatggagtctcactctattgctcgggctagagtgcaatggcgcaatctcagctcactgcaacctcctcctcctgggttcaagcaattctcccacctcagcctcctgagtagctgggattacaggcacccgccatcatgcccagctaatttttgtattttttgtagaaacaggggttcaccatgttggccaggctggaactcttgacctcaagtgacccacctgcctctgcctcccaaagtgctgggattacaggcgtgagccaccgtgcctggcctgtactcaccttttaagattgaaacaaatatagaacactttgaacattgcctggttatatccattcctattaccacaaaaatgctgtataacaaactgaatttcagtggagtacaatgatcaatgtttatttttgctgacaaatctagattttggctgggcagtttttctgatcttaactcattcatgctccttcagtcagccatgggttgtgtaggcagctctgctgatctctgctatcctctctcacatgtttggtgatgtaggatggccacagctggggctatttggccctctttcctgtgacgtctcgtcctccaagaagccacctctggcttgttctcatgtcagtggcagggttccatgagagagtggaaggcagttggaactggaacctcattagctctgccacattctactggtcaaagcaagtcacaaggctagcccagattcaagaagtggggaaacagactctatctcttgatgggtagaacagcaaactcacattgttaagagacatagactcatagcaggtagaaaattgaggccatgttagttatcagtctaccacatcggcacataataaaatctcgagaaatattagttactgtttttacttgtgtgaattgcctagttttattttgggatttttaaaattaggattattactttgtaagagcccctcatagatgtttcagttgtttttgatctttgaacttttggggtagattattgttgctttttgcttttttgctttatccctacaaaagtttaaatttttatacagtcagaaatatcagtcttttcctttatgatttctgcctttggtctcattcctagaaagtccttctccaccccaagattatgtattttaaaaatcacctacattttcttttttttttttttttttttttttttcagacagagtctagctctgtcacccaggctggagtatagtggaacaatctcatctctctgtaacctctgcctcccagtctcaagcagtcctcccacgtcagccttccaagtagttgggactacaggtgtgagccaccacacctggctaatttttgtattatttgtagagacaaggtttcaccatgttgcccaggctgatctcaaactcctgggctcaagcaatccttccacctcagcctcccaaagtgctacgattacaggcatgagccaccacacccagcatctacattttcttctagtacttttatgtttcatttttcacacttaaaccctttatctatcatgagggctgacttttttaaaaagacttcttcaaattattgagtgaaacaaaaaggaaatcaacaccgaaactgcaaaactgcaagaagtataaaaggaagtccagcttatgaaatctggatttcccgttcaccatagcttacattagaaagactctgcccagagggatggcccgggccagatgctacagagagagacatgcagggagctagttagtcaggggttcagatctagggagggtgcatttgtgaattcctttttaggaagtgtgtttgaagttaatatgatgaaacttacacttcatatagaggagagtatgaaagaagggaaagtgcatcaaacctgtgcgtttcacagtagaagctccgtcctcacagcttagtaaacaccaatgatcctgtctctaattctctgtctgtaaaaggttcttttgaaccccaggaaaagtagttgacatgagaaaagcgtgcttcttggacagaggtgagggagtaggcaggagagtggtataaagtgataggtggtttgcagacgcgggcacgtcagggaacctttgcagacaggtggccctagctgatgtccctagaccttgctcagttgagttctttgtgcacatctcccactgggctcctctggcccagagatgaggttgtctgctgaaagatgcagtaaagaggctttaaagattttgtggccttgaaccaatcacacaagcaaggctgaaaggactgagcctaaaatggagctgcccctgaatgatctgagtcttcatcaggcagcaccttgcacacagaccatcatctgatgatgggaacaaacttgtgtttgggtgaaacaggcttccccattgcagttactataacacctgtgtggtagtaaggtgcagaattactcaatgcccacttcaagtttaccattgagatgatttcccacccccctcctctaactggcaccattgcccataactaatttcttgctctccccaggtgcctcaagaacctcttgggggcctttatattctgtcatgcttacctagctgatcgggacatggagtgtctgtcttagtaaccaagcctcagtcagctaaaggagctgcatctgattcatatcctaatgtggaccaccaatcttgagccccttggagctctgctagagaaagttgctgctactctcgagaccctcacgttaaaggactgtcagatccaggactcccaactcaggctcctcctgcctgccctgagccactgctcccagctcaccaccttctactttcatggaaacgagacctccatgaatgctctgaaagacctgctgtgtcacacaggcgggctgagcaagttaggcctggaattgtatccttcccatctggagagtcttgacaacaggggtcatgccaattgggagatccttgccccaattcgggctgagctgatgtgtacagtcagggaagtcaggcagcccaagaggatcttttttggtcccgtcccctgcccttcctgtggctcatggccatctgagaaagtggacctccatctttgctcttagggaaggcctgattagtgggatggatacgctttcttctggacccttgggcactaaaatctaggacacaggtgcttttttttttttgatggagtctcgctctgtccctcaggctgaagtgcagtggcacaatctcagctcactgcaacttccacctcccaggttcaagtgattctcctgcctcagcctccctagtagctggtgttactggcatgcaccaccacacccaactaattttgtatttttttttcttttttttttttgagacggagtctcgctctgtcacccaggctggagtgcactggcacgacttcggctcactgcaacctctgcctccagggttcatgccattctcctgcctcagcctccagagtagctgggactacaggtgtccaccaccacacccagctaatttttggtatttttagtagagtcagggtttcaccaagttagccaggatggtctcaatctcctgacctcgtgatccacccgcctcggcctcccaaagtgtaatttttgtatttttagtagagacagggtttcacgatgttggaggaggctggcctcaaactcctgacctcaagtgatctgactaccttggccttccacagtgctgggtttacaggcatgagcagcctggcccggtcaggtgcatcttaaaggaagcacacggtcatgtgtttcaggcacgtgctgactgtgagtggaaaaacaaaggtgactcagctgggggcagaactgggtgaaaatgctgacttggcatcaataaagccttcagggacctgtttcctagactcagaaatggaacctgaagttctagaatgatgcaggagttaccctcgcacggatggttatttaaaaatgtcaaaaataaatggaacctgaatggaaaaaaaaaaaaagaaagactctgcccattctgcccactctgagattgtctatgcttcctgtttggcattcaagaggaagtcctcatatttcccagccatattttgctggtatctttaatatttaatcccacttgtggtcaacaccgaaaggaaaattctatttctgcctcacatctcaggtggagttgtagtgactgaaataatcacaggttgatgaagcctgcttgctacaatgtataaggtccatactgtcagggctacatagatctaactattctaacactgagatttatacatctatacattatttttattctcataggaattctttttaaggtttcgtagctttctcctctgccaagatacaaaatagggaaccacaaattatttatttaaaaaagaaatagatgaatgatattagattccaactaccaattggacagctcctgaggtctcacagtcagccacttttttatcttataagtgatatggtttggctgtgtccccacccaaattgaatcatgaggcagttacccccatgctgttctcatgatactgagttctcacaagatctgatggttttataaggggctttttcctctttgctcagcacttctccttcctgccaccacatgaataaggaggtgtttgcttccccttctgccatgattctaagtttcatgaggtcgccccagccatgctgaactgtgaatcaattaaacctgtttcatttataagttacccagtcttgggcatttcttcatagcagcatgagaatggactaatacaataaatacttattgaacacctattatgttgttgaatctcaatatcaccttttcctaaattgacggaattcccctggcttgcttttttgccattgttctttgcctcagtgtcaccatttacgcaagtccaaagcctaggagccattccttgcttttttctctatttcctttaccttttccaccaacaccaagtcctggatagtcttcacattctttctcctttctttgttcccagtatcaccatcataatccaaatcttcctcatcatgagtcccagcatcaatttttgcttaccactaatatattttccttatgaaaatagagatctttaggaactacaaatgtgacatgtcatacttcagtttgcaatttttctttacttgtcattaaacaatcaaaactctcttgtggtttagaaatccctatacagtctgacccctgtgtagctctcccagcttctcctctcactcagtgaactcaatgcttcagccagagagtttatgtccttatctcctggccttaaattaacataagctgatctcttatttggaacattcttttctttctctcccatttccagagcctaatacttattcatttatcttaagagttatgaaatattatacacaaaaaatgtaatgcatatacgtatatacatgtgactaaaaggatgaaaaatgtgtcaatatataaaatgatatttctagtatgaaaaatatatctatatgtaaaatgatatttctagtaccgttgaagttccttgagtgcccccttcaaccatgtccctttcctcataccagagataaccacagtcttgaattttgtaattgctgtcctcttgcttttctttataaacattacaacaaatgtatatttccctaaacaacatatgatttagttttgcataatgaaactagtttcacatggatatggttcatttttactgttgtaagatatttcattgtgtgactattccaaaaatttactttttattttgtcaatgaatatttgggcttccattttcttgatattacaagcaatattgctatgaatattcttataatgtctcctgatacatatgtgtaagagtatgaatttaagagaacaattactaggttgtaggatgtacattctcaactttaccaaataatgcccaattctttttccaaagtggttatactaatttacttccttctctccatatagtattcatgagtagccattgatccactgtccttagcagctcttgttgttgtcaagccttttgccaatccaatggttgtaatggtattacttggcttttatatatatttgctgtgttactaatgagtttgaacatgttttcgtgtttctttgccatttgtattttgtgcctgtttatgtcttttgcccattttcctgagttatctttttcatattgaatttacactctacagtatttatacattttagatattgttcacttgttttccagtattcaaaaaacatgactagtcatggtggctcacgcctgtaatctcaacactttgggaggctgaggcaagagcattacttaagcccggaagtttgacacctgcctgggctatataggaacaccctgtatctacaaaacattaaaaaaaaaattagctgggcatagtggcattcatctatggtcccagctactcggaaggctaaggtgggaggattgcttgatcctgggaggtcgaagctgcagcgagccatgatcatgctgctgcactccagcctatgcgacaaagggagactctgtccagcctatgcgacagagggagactgtctccaaaaaaatatgtatatttaatctgtgtttaatctgtacaagccactgagctaaactctaagaatacagctgtggataagacagaaactgctcctgccctcatgggtttatcccctcacttaaagggggtcaaaaagtaaactaataaatctctaaactaataaatctctaaatggtaacatcatcttagctttgtactttctgagggtgaagttaccagacccctactaaattctttccccctgaatcctgtattaatacttccatagtacaaacattattattaataatgtttttcttcaccactagttgacaagttttctgaaatcagcagcctatttttttgtttttcatttctgtacctccactacttaacatggtcattacataagggatgcaaaataaatatattcattgaatggatgaatgaaaatatgtcattactaataataactgaaaattcagtgttcactattgatatctagggagtataggtctagatctggcattttgatactgacaattacaggtataactttcagtagaaagtagatatttcaagccctatataaagtagctgggtgcagatttcttaatacaaaaacccggttgcctatgtctacatgttaggtaagccaatttagatttagtcattttataccaaagttatttacagaaaaaaagtagacctagttgtattatcaaaaaattagagttgactgggcacagtggttcactcttgtaatcccggcactttgggaggctggggtgggtggaccactttagctcaggagcccaagaccagctcgggcaacatggcaaagccgtatctctacaaaaattacaaaaattagggcgtggtagcatgtgcctgtagtcccagctacttgggaagctgaggtaggaggatcgcttgcacctcgggaggcggaggttgcagtgagccaagattgcaccatggcactccagcctgggtgacagagctagaccttgtctcacaaaagaaaaaaaaaaaaaagccaaggcaatacaacctagtaagagtgataaggcacatactaataaataattagaatacaaggcagaaggtgataagtaccacagagtggagagattgatatggaagatcagggaaaagatattacttccaggataaaaaggagggggaaaggccaggtgtggtgcctcatgccataatcccagcactcctaggaggatgaggcaggaggattgcaggagcccaggagttcaagactagcctgagtaatatagtgagacctcgtttctacaaaaaatgtaaaaagccagatgtagtggcacacttcagtggtctcaggaggctgaggtgagaggatagcttgagcccaggaggcaaaggttgcagtgagccgtgattgcgccactgcactctagcctgggcgacagagcaagatcctgtttccaaaaaaataaaataaaacaaagaaaaaagaatacaatatattgttaactataatcatcatgtagtacaatagatcttttgaacttattcttcctatctaagtgaaattttgtatcctttgaccagcatctctccaactccctcctttcaccagcagtcacctcagctgctagtaactacctttctacattttttcttttttaagacagagacttgctctgttgcccaggcaggagtgcagtgatgtgatctcagctcactgcaacctctgcctcccaagttcaagtgattctcctgccccagcctcctgagtagctgggatcacaggtgcgtgccacctatgatatatatgtgtgtatatatattttttatatatgtttatatatatgtatatataaatatatatattatatatttatatatattttataatatatatttatatatataaatatataatatatatataaaaaatatatataaattagcctggctaaattttgtatttttagtagagatggggtttcaccatgttcgccaggctggtttcgaacttctgacctcagatgatctgaccacctatgcctcccaaagtgctgggattacagacatgagccaccatgcctggccaattctactttctatagtacttctatgagatcaacttttttacattccacatatgagtgagatcatgcagtatgtgtctttctgttgctggcttatttcagttaacactttccaccaggttcatccatgttgtcacaaatgacagaatttccttttttatggctgaataatatttcattgtgtatgtataccacattttctatatccatttgtcagctgatggacacaagttgattctatgtcttgtctattgtgaataatatatagcaaacatgagagtgtggatatctcttccatattgatttcattttttaaagatatattcccagtagtgggattgttggattgtatagtagttctatgtttaatattttgagaaacctccatactgttttccataatggctgtatgaattcatattcctactaacagtgtgtgcgggttcccttttctccaccaaagacttgctatctttggtcttttccataatagctattttaacaggtgtgagatgatgtttcattgtggttttaatttgcatttccctaatgttgatgttgagcatttttttcatatacctgtttgccatttatatgttgcttttgagaaatgtctgtttgagtcctttgcccattttttattggggttgttttcttgctattgaatttattgagttacttgtatattttggatattaatcccttatgagatgtatattttgcaaatatttcctcccattctataggttgtctcttcattctgtttattgtttcctttgctgtgcttattagtttgatgtaatcccatttgtccacttttgcttttgttgactctgcttgtggggtcatatccaaaaaatcattgcccacactagtgttatggagcttttcccatatattttctgtcttagttcattttctgttgccataattgaatgcctgaggctaggtaatttataaagaaaagaaatttattatttacggttctggaagctgggaagtgcaaggtcgagggtcttctgcatctggtgagggccttctcagtgtgtcataacatggtggaggacataacgcggtgagtgaggcacactgagaacaaaactggctcctatgacagatctactcttctgataactaacccactcctgttcttccccattaattcacccactaattcatgaatggattaatccacttatgaaggcaaagccctcatgacccaatcatctcttaacagcttcacctcttaatactgttaaactgaggattcagtttcaaaatgagtttcaaagggaacaagcattcaaaccataaccattttctgctagtagtttcacagtttaggatcttacatttatgtctttaatccattttcagttgatttttgtatatgggatgagatgagggtctaatttcattcgactgcatgtgaatctccagttttcccaacaccgttccctgaagagactgtcttttcgtgtgttcctggcatcttcgtccaaaatcggttggccataaatgtgtggatttatttctgggctttctaggctgttccatcagctatgtgtctgttttatgccagtaccatgctgtttggttactatagctttgttatatatatatattttatatatacgtatattatatatatataatatatacgtaattcttttttttttttttttttcttgagatggagtctcgctctgttgcctaggctggtgtgcagtggcgtgatcttggctcactgcagcctctgcctccctggttcaagcgattctcctgcttcagccacctgagtaagtaactgggattacaggtgtacaccagcacacccagctaattttgtatttttagtacagggtttcaccagttggccaggttggtctcaaactcctgacctcaagtgatcagcctgccttggccttccaaagtgctgggattacaggtgtgagccaccatgcctggcctttgtaataagttttgaagtgaggtagtatgatacctccagctttattctttttactcaaaattgctttggttatttggaaccttttgtggtttcatacaagttttgagattgtttttctatttctgtgaagaatgtcattggtattttgatagggattgcattcaatctgtagatcactttgtgaaatttttttttcaaaaacataatcataataccattgtcacacgtaaaaataattaacacttatttttgactgaaccagtcttaacaagaagcatactagctattagccaggcctcagatgagaggatctaggcatcatcattcacacaacaaaatatttatgtgtaaatgacacacactaacaagcctaagtattaaataatgtactgaaagaggagagtctctctcctgagtaatttactaaggacttcaattgtgaaaagtatgccccaaacaccaattaagtgtgccaaaagcaatttattcatgtttctagagaaaaataaaaggggaatatctgagttgtggttttccatgtatgtggatagtcgcattagtaatgaatcaaggaacactttatttcatttgtgaagcagcacttgattttatatgctctgtggtctcagttggctttacataagccagggataggatttaagaaaagaaatctcttcaagttcatgtataatcaatttatttagaacctataatcattaagttagctgtgtcatatacaaaattagaagaaaattaaccaattatcttttgttacttattttttagaacctgagatttttgttcaactttgtaatgtgaaccttttctgaaagctctatttgtcagtggcagaaatattacaaatatttctagcatcatacagtttttcatatgcccttaagtagtttctaacattttaacatttttattcatatctcttaaaaaagaaaattttgaagagttccttttcatttatttacaatgaaatttggaaacaaaaacttattacattacaaaatctaaaataaagttaccttttttaaaaaaatggatcataaacattttgtaaaaagagttgaaaataatcattgttcttaagtcttactgctagaggaagttgtacacattaaggatgtatgtggcactgtttccaaaataaatgtatatttatgctacataagaccaagattagaccattgaagttgtaatgatcattctagttctcaaattcaaatgcaatttttttcaatacaaaaaagagactgtacaatgaaggaaaactcataatgcttttgactttaccagatgctagaggctactcaaaataaaggccagaatgtctccatatttagcgtagttcttctctatactcaacatacttgtagctgagttcatggtgtacatttttcgtgaatggttgtttataggatgtttatatattatcttggcaagataactttgaaagcccactgttttcctagcatttttctatggttgctaaacaatttctgcccaatctaaaaaattactttcctataccagcaggtggaggcaagagcagtcgaattgtagcactttgcttttcaagtgtactggcatgtattgtagattatctatccatgactcaaagtctctttatgacgtgtctctcacataattacttttcttcaacaactctgttgttgttttagcatcttcttttgattgctttattatttgctttatttacttggtgtctgggactgaacttagtggtcattttaggacagactaatttagattttcatcactttcctatactcattgattgaacagttaaaacatatatgttatatgctgaacacattcttccacatttgccaagaaatacaaaaatgactaagacatggaccacattcccaaagagcttacattctagtagaattacaaggaaaaatgtcttcaattcctctcctgacttggggaagcagatcagtcagccttgctggtatagctatggctagcattgggtagtaataaagctcagtattcacgtggattttaattccatcaacaaatatttactaagcaccagggactacattggggattaatttataaacataggctttttgtcttacagataaaaaaggccaaaacaatcttcaaaagaagtatcatttatttttaaacttcttaatacagattatatagaacaaatagttaaccgacatatagatcctgatgcattgcatttaaggaactttcagttagaagtaactgtgtgtaacattttctagaatatacttagaaaactttccacaaatcctggttgaaataaaataaaagtatgttactctacatcaattccattagctgtttatttgtagccaataatgataaaaaatatatacaaacagtatgaaagaggagaactgagttctaaggttatgtctgtatgtgcagaatgagagatggagaagaaactcatagttatggaaaacagaaaagaatggccccagaatttcttgcaagacttagcagccaccaatattcagaactgtctttaagccccaacctgtccatcatcttaatacattgtgcatcagaaatttccaacccaattaaaccatttttgtttccttcattggtttatttatgaaagtcactaaaaagacacaaatctggtctaacctattttagccttacctcttatccctccacatcccattaaacccgtgtacccaccttacctcatagagctatcttgaaagactcagccagtttagaagttacatcctcattgaagtctttcctagattccccaaggcagagtcacacacactgtcctcttcattctccattgccttatttatatagaatttgttacctgatattctgttatttcattattatttttagagacagggtcttactctgttacccaggctggagtgcagtgacacaattgtggctcactgtagcctgacctcctgggatcaagtgagcgtcccaagtagctgggactatagatgaggtctcaccacgttgcctaggctggtcttgaacttctgggctcaagtgatcctttctctttggcttcccaaattgctgggattacaggcgtgagccaccacacccggcctgctacctgatactctaatgtctctttccgtatttcttcctcacaagtctgtactctcctgaaaggtaataactttgtcttattcatctttgtaacctcagtaaatatttgctgaaggaataactgaatcaactatttcttgagaagtccttttataataagcttctctctccccttttttttttttttttgctgatgtctgaattatagtcataattccagatgatagatgatagtaacaagtcaataaatcctatcaatagggaataaagaaccagcatttattgcatagagtgttttcttaggatacctcagctgaggctgggcacagtggctcatgcctgtaatcccagcactttgggaggccgaggcgggtggatcacctgaggtcaggcgttcaagaccagcctggccaacatggtgaaaccttgtctcgactaaaaatacaaaaatttgtattccagctactcaaggggccaaggtgggagaatcacttgaacctgggaggtggaggttacagtgagccaaaatcatgccattgcactccagtctgggtgagagagcaagacttcgtttcaaaaaaaagagaaaagaaaagaatgcctcagctgaaccttatcaataaaagatgtagattatttgtttgagtactttaaggaagaatttgccatttcctgggagtacactgtttccaagtgatttattgattacctatgaacagttcattaaagggctctggaaaaaaatgagacctgggtgcagagggcagccatccaggtcttccatgtttgagtggttttactctttgagaacaggtgactaaaaagctgcccaagtctatgtgacctgtttttcagagctggatgaaagctaaagtggggcacttctccacagcccctgcagcaatctctcagggagtggtatagataacaagtcagacatgtgatgtaagcatgtatgctttaagtcaccttattctctccccattaaaagcaaagtacaaaatcagagaagtgcaattggtgagaaatttgatgatttccttttctgggatgggagttgcagcatcagtataggataataaagaataagggccctcagatacttttcagtttataaataaaaatacaaaagaatatgggctctggagtcaggcttgggtttgaatcccagctgcacaaatgctatgtgaccttgagcaagctacttctctgtagccagtaaattgggttgataatatcttcctcttggcttattgggaggattaaataagaacatgcatataaactcttggtgtagtgtcttgcaaaggcctgaggagagcttaacagtttgagggagatgtgaaagtagttcattatgtctggagcatagatatgagagcaaaaggatggcactgagaaagccagcatggtagttagggcagattcagaagtagtagcttgaacttgatcctgaagtcactggggaaccatgccattgaaagggagtgtcatgatcagatttatgttttaggatgattactctgcaggcaatctggagaacagattagaaagcatccagaacctcccgggtttctgatttggacaactgagtacatactggtgatcgtccttgagataagaaataaagaaggaggacagttttggttctgggggcaaggaagatgagcaatttaattttagacatactgtattaaggtgaccattgacatccaagtggagctacccaacaggcagttggtcatatgggtctagaactcaggagatttgtgctggaggtacagatctggaagtctttagctataggtgacatgtgtagccatacaaatggaacaggcatggtgtgcaagatgaaaagaaaagaggccatagaactgaatcctgaagagctctaaggaatcctgagaaggggctaaaaacaaaaacaaaacctaaaaaaagacaactgatgataaaaatcatgagggaacagccagagacatcaaatgaaaagaggaatcattatcacaaaagcccaaagagggaaaagttcccaaaaaagagggagttaaaaacaggaaagagtggaaaacactgtcatgtatcacaaaaagtcaagatgtaaatagtgaagaatgtctgttgcatttagtagaaatcactggggaccttggtgagagcagtttccatttttttatgagaccaggacccagattgaagtagggtgaagagtgtttgggacataagaacaaaaagatagtagggctggctggaccactttgaaaagtcttgaggatgaagggaaaggaagaaatagtggtgtctagtgggggacccaggatcaaggaagtttttgtttttttacttaaggtggagaaatgtaaatactccagcacatgtgtgtataaagaggcagtacaaatgagacatttaacattttgctgagccgggcgcggtggctcacgcctgtaatcccagcactttgggaggccgaggcaggcggatcacaaggtcaggagatcgagaccatcctggctaacacagtgaaaccccgtctctactaaaagtacaaaaaattagccgggcgtggtggtgggcacctgtaatcccagctactcgggaggctgaggcaggagaatggcgtgaacccaagaggcggagcttgcagtgagctgagatcgtgccactgcactccagcctgggtgactgagcgagattctgtctcagaaaaaaaaaaaaaaaaagattttgctgagagagatgatgtttcatgggtgatgtctctggaagagattggataggacccaagcacagagcaagaaattggctttaggcaagtcagatttgtcttatactagttaggagtaaagagaaatggatgatacagatgcagctatgttcgtaggagggaagtggagggaatttctgtgtgatggctttagtaatgtaggcagcaaggtcaactactgacagtgagaggagaaattcggggaggctggtcacagtttgaagtaataggtcatgggaggcagatgtttgtgggtggattttcctgaaggcttgggagtccaactcaaatcagaggccatgatataatagtatcaaaacccatagctctgttcagagcctgctatgagaatagagaaggtagctggttaaaatggtcctgagcagaggtttttaagattgatatagcagaaggactggaagttggggttttggtgagagatggttgacctgatagatgaagttcacttctaacagttgtgcaacctgaggtgaaactacaattggaagcccacccctggccccctcctgtaccatgaggggcctcacatgtgtacggatgcccccacctatatgtccaaactctgaccacactccctgctcttaatggccacacctcagtgcaagatatgtacaaaccaatggtgcagttcaccctcaggaaaatggaccctaggaaggggcccacacagattctgggagccatttgagcaagggattctggagtcttgtcacccaaagcacagttgcaggatgttagtggcaagctttgcatgagcacatccccttacctcatctgagctgagtgcagacacaggagggccagagtggagcctgccaaagtacagcagtcagccaggcgcagtggctcacacctgtaatcctagcactttgggaggccaagacgggtggatcacctgaggtcaggagttcaagaccagcctggtcaacatggtgaaaccccgtctctactaaaaatacaaaaattagctgggcgtagtggcacacgcctgtaatcccagctacttgggaggctgaggcaggagaattgcttgaatctgggaggcagaggtttcagtgagccaagatcgtgccactgcactccagcctgggcaacagagcaagagtctgtctcaaaaacaaaaacaaagtacagcagtcatccaggtcgaagggttgagctgtgggagaagtctgttagagtgagaaaatagagggattaaaggactggagttctaagggagatggaaaactaagaatcatgggagtagataaatggaagctgaaaacatagaaggttgtgattacagtggaatagctgactttatcatttctgaggagcatctccaagtggtggtaagaagaataaatacaaaggttcttggagtgaaataggttaaggaagtgatgttggctgggcacagtggctcatgcctgtaatcccagcactttgggaggccaaggtgggagaattgttgagcccaggaatttgagaccagcctgggcaacatagggaaaccccatctctacaggaattaaattagccaggcatgatggtgcatgcctatagtcccagctattagggaaatgggaggatcaagtgcttaagcccaggaagttgaggctgcaatgagttataatcacaccactgtactccagcctgggcaacagaacgagaccctgtcccaaaaagaaaagagagaaaaaagaaactgaagttaagggagtggtaagccttgtccacccatccttagagtctccctgggatgattatggaactttagacagggactgatatggtttggctgtgtccctacccaaatctcatcttgaattatagctcccataatcctcatgtgtcatgggaggaacccaatgggaggtcattgaatctgggggcagatttttcctgtgcttttctcgtgatagtgaataagtctcacgagatctgatggtttcataaagggcagctccctgcacatgctctcttgcctgctgccatgtaagatgtgactttgctcctccttctccttctgctatgattgtgaggcctcccagccatgtggaactgtgagtccgttatacctctttttccttataaattatccagtcttgggtatttcttcatagcagtgtgaaaatagactaatacagggactgtagagctaattctttggtgaatatgagaaaatggcaaagagtttagttgatgacagcaacaaagagagttagtaagggatgtagcaggaagccagtagcctcagaggattagaattgtagtgcagtaatgatttggacagccctttgaggatcaaggagaggtttaccctgtgtcaaggcctcctagtgtgaggagcctgagagaatgtcagtgcacttcatgggagaggcagtgcattcaccaggaatccaggttacagtgaagacaaagtggaaaagccagtgccctgtgacagggttgaggatgtagggtagggggttgagtgtccaagaaagagactggcatgatgggagagcttcaccaactggtgatgctgaacttttggaacagtggcagaatgtatgctgtgaaaggacacagagcagagagaaaacagtaagttcacaaatatttgctgtgttgaaggtctcgtactagaaacctttaggtaaacttttgtgacttctatcttagtaagctcagtcagtgaataagattaattctcacttgtaaaataataaggacatgaaatttaaacagtcttgtggaaaaaccatttttatattctaatcatattatcaatacccttggccctgctccctatggaaagaactgaaagtcttttctgccacactgtgctcttgaaagtagtgcttactccttatttctgcatgttgtgaggattagatgagtgttttaacactcctgcacacatgagctactcggtaaatgagttctcccttcctctgtttctctgtcctttcttccttccagagaagacacctaggaacctagtttgcgagtggaaaggagaaagggtacccaaggaagggcacaggcagggctgcttggcatacatgtgctgtcatgtggaatctcaggaatgggatcatccagtcagtgctgtccgttcgaactttctgcagtggcgaaaacattctctatctgtgctgtctagtgtggtacccacttactacaagtggctattgaatatttgaaatgtgcctggtacaactgagaaactgaattttttattttatttactcataattcatttaaataaccacatgtacctgctgtgttggactgcacaggtctagtggataatgtgctgcttggctgaaggcttcaagaaagaaatggactgagtacctgaggaaatagataagttggcctggcacgatggcccatgcctgtaatctcagcactttgggaggccaaagcgggtggattgcttgagcccaggaattgctcattatgggcaacatagcaagactccatctctactaaaaatttttaaattagctgggtgtgctggcacatgcctgtaatcccagctacttgggaggctgaagcaggaggattgcttgagtccaggaggtctagtttacagtgagctatgactgtaccactgcactccagcctgggcaacagagtgagactttgtctttttaaaaagtaaagagaaagagagagagagaaaaataaagaaaaaaagagaaataaggaaagaagaaagaaaagaaggaaggagaaagaaaaagagaaacaggtaaacctcagtgaggtgtgtagctgggatttggcattgtagaaatcagaaataaaggagtcctatatggtctgatgaaaggaccctggacttgagctatggcctgagaagttgtgaggagaggggtgatttagtcaaaacaatggctagaaagacaactttgtaaatggtagaaatcaggattagagtgtttctgatgtaatagccacacaagagaaataattaaacttatacaggaattccggtcttgtggggagattgatttaatgcagacctcaagagcagcttgtagagaaacattaattgcaaagcaaatactaggaatatttgccaagtgtttcaaagaattgggacaaatttctggaaatatcctgcaaaccatgtagtacaacacagtgacatggtgacagggaaagggatggaaaaaatgtaaattggtaggaggtagaagttgtaaaattttacataatatagtttcactatagccctggctctaataaaacgtgtttccctgtatgaatgtttacttgtgatgatgagggaagatggtgttgctttaatgtttttgtcatatttgtcccatcttgtttcaagtatataatgaacatctgtctgctcatcagtgtgcagtgcattggggtgggggtttgtgatgaaagaaatgtacagtggccattgtgcttgagaagtcctagtttcatttagaatataaaacaaactaattgaataggtgatgacagtaatttaaatgtctaaaatgaatggcacagatgaaaggtgaactggaatggtgaaagccttgatgagaggaagtagaggactttaaactatgcttcaaaagaaaatgaaccccataaatcaacatttctgaaagtacattccataaaatattttacaaaagtctcaaggcaataattaactcagaataactatggcatacttatttgtccaaatgaaattctgtaacctgatgatttctgtcaaaatttatccagctttcttcctttgcctaaacactattattatgatgatgatgatattattttggacacaggagattacaatgctagcaaatgcaccttcctgtcaattcccgtatggtattctgtattatttcttggttagaaatttcacagtgttggcctggtgcagtggcgtatgcttgtcatcccaacactttgggaagctgaagtggaaggatcacttgagcttaggagttcaagaccatcctgggcaacatgggaaaaccacatctctacaaaaagtacaaaaaattagccaggtgtcatgcacacctatagtcccagctacttggaaggttcaggtaagaggatcacctgagctggaaggttgaggctacagtgagccatgatcacgccacctggactgtagcctggctgagagagtgagaccctgtttcaaaaaaaaaaaaattcacaaaggtcatgttttgaaaagtgctttgaaaacagaggagacgatgaagaaggtatgattgagacagaaataataaagagcctggaattttgtagtaggaaaaagaaatctagtgtttaattagacaactggaatctcagatttgatctactttttcattttcaaattattagacgtaataactgctgtaggaaaagacaggctcatgccgtttgtctgcttttgacttatgtagctctcacttgcaaaaagtcagagaaaaatcttcaccaggttctcaagaatacaagtgcagctgctggaatgactacaggtgcactggttttcccacccaggtgcagttctttccagggctgcagaggcacggaaggggaagacgagatcaatgtaccagcatccaaagcattgggtgagcttgaaaatgtaacaaaggggaagaggagggatgctccgcaaaatgaagatgggagaggaaaagcagagataatgcagaaagaaagtactcagtagatcaaaatgttttagttagaagtataaggcattccgctgtcaccattccttttctttggtaacaagaactgtgaatcctgaaaagaattaaggtaaaatctcagaaggtgagaaaaaaagtattaagataaaaattttaatgtatttagttgacccatgacatcatgatttctagcttttgtttctgtctttttagcccttccaggttcagggaatagtattacattaagggagaaatagcttttcactagttgccttggaaactataaaacatatatgtgtccggccgaggtggaggtattgacatccttatcagtttaactttcccactacaaataaatgacaagtgtctgaggtgatagttatgctaattaacctggtttgataattacacaatgtatacatgtattgaaacatcgcactgtatcctataaagatgtgcaattattgtgtcaattaaaaacaaaataagacttaacaaacaatcagatatgctgtgaccactcagccttccagtaaatgttaggaaatagatgaaaaccaacgaaggtcatcttatcagtgaaatgcttgaagtaattttcttttaaagctgaataataggctgggcacggtggctcatgcctgtaatctcaacacattggaaggccaaggtgggcggatcacttccggttagtagtttgagaccagcctggccaacatggtgaaaccccatctctaataaaaatacagaaaactagtcaggcatggtggcacaagcttgtaatcccagctcctcggaaggctgaggcacgagaatcgctttaacctgggaggcggaggttgcagtgagctgagattgtgccactatactccaacctaggggatagagtgagactctatctccaaaaaaaaaaaaaaacctgaatattaatgatactaatggaaatttgtctatagtcattggtttatactaagaggagtggtgaaaagaacagggtgttaagatggatatgtcctatgttttagtcgttgttcttctctttcatattcatgtaactcagtcatctcagggccagcctttttacctatactgggacttccttgaagtacagcccgtcatggccatgactgactctttcttagtggcctctgttggcagaaataattattttggaaattttcagccaactgtataaatcctgaactgaacatctttattattttgcaccaacaccaagtatgtgagaccctctactcatctgccatttcttgtactctgacctccatactgttggtttctccctatacttattcctttatcagttttcattcctttatcagtaggatcctatatgaggcaaataatataaaaccccattctaactgatttcatcatagaggggacttactgactcataactggaatggtcaggctttacaattagttgatctatgggctctatggtgtctttaaatatttggtttccttcctttattctgccattcaaagtgtctgttttatcgtaaatcagattctgctcattctcataggatggctgccagctgcaatcaaggacataagtgtactcacacttagtgggaatgagacccccttctctcacagcattccaagcaagagtactgagggtagggacagctaccttcaaagaacgtgaactatgttgggggtgtatgagtgttgagaggaagatgtgcatataattagataggggaagaggttaatggctagacaaccatgtatatctaaccatctactgcactgacttctccattgttatttctggaacccttgtcctatggtaaataaactcctccactttttcatactattccctgaatcttcccttctcttcctgaccttttctaaaatccactgaaccctgacaaaaatgtttcccatgcatccctcttcctcccacaccccataccacaaagtaaggaggaaagatcagtatcttcttttcccccagaggccccctccaaccactgtgatgtcctgcacttcttcaccattgtgtaaaaacacctttgaggctcatcatctggttttcccattttatatcctgctcatgttgtctctcccagtcagctgagagttccttcttcagatactcgggttcctggttcagtcttcctttctactcccgggatccaccatcaacctgctgactccagtgttcatgtaggcaatttatccaaactagactcttgtttcttcacactcttgcaaagaaactgcttaacccttgaagtcttaaattcagatatctcacatttttactataacctgactactcccattttactgttttattgattttactaagactgtagtttttctgtctaaaacattgctcatgttttatattccatttcttcctatctctgtagggagctcagtctctctaaatatcttaataatgtaattgaaaaaaagtggtttcaagtagaatcataactatgataaatttcttacatattttgtggaaatttaaaacatatttatacccaaaacttttgatctaaaaccaaggccttttgctaactgtaaatgatttgattggcatttctcactatccttcttgtataaactacacctataatgcatcatctttgatttccagtttcagcttctcgaaagtggaacatgcgtataaggaaacatataagtagtatgaattcagaagccttctgaattgtcacaattcctttcccaatctttcataaggacaagttttttgtgggagttgatttttctgtaactctctttttaaaagtatttctgaaaccttttacctatcccagaaataagtttttaaatgttgtatacatttaatcagtcaaatatttaaattacatgaaaataagcataacaggcataaacaggttttggaacaacaggcttaaccattagttagcatataactcaactggtggaagaagaaatgtgaaaatgtattagaaaatagcctggcagcctggagttgtaagcatcaactagtatgtggacatgagttcttgtggagagtaagttgaagaggtcagtatttaggtctctcctgtgtgaaaaatgtatctattctgtgcctcagcctcttttagctacactgcgttagctctccttatttccacggccagatccacagagaattgcctaggttcacactctctccagttcttcacctcttccttattcctccatcatagtagtctgacctgtacccctgctgctcccctgacactggttttgccagagtcatgaatggcattctgctgctgtattcaacaaagacttttcagtatttctcaacatctgtacgtttgctgttgttttcactgcttgcttgtcacaaggtcctagaacccatattggcctaatattccttctccctcagtgatcatattagagttagggccccaatgcttttctcttctcactctgcaaactcccttgagtactcctataagtaaaattaccacttaatattaattcctcttacatgttctgtagccacttcaaacttggcatgtccaaaatcaagtttctcttttttcccccaaaaagcctcctttcccttgactctcttgactctctcacctccaccgcctccatccattcagtaccaaatccttttgagtcaaactcctgaatatattttaaatcattccgattcctcctatttcctagttttatatactttaatcatgagccccaatagctctaagaacaacttctctcttgaatgatctcttttacaaacctttcaactcattataatttgagtgatttctctaaaacacaaatctgttatctgtcacctgattaaaacctttctatggctctcgaattgccttcagaataagattggatgtttgggggagttttttgttgttgtcgttgttgttttaatgtttcgtagagacaatgtttcactattttgcccaggctggtctcgaaccctggaccttaagcaatctgcctgcctcaccctctcaaaatgttgggattataggcatgagccacggtgcctggccaaggttggatgttctgatgattcccaaggctcttcatttgctaaatgaccttacttaccttttcagccttctctccccttatggcattacctttggataattcctacacattgttcaaatgttggtttgctagttgctctttctagaaaatctttcttgacacattccccctgccccaagaccagaatggggttcccttcgtttggagttctctttgcttacacttgtcataacactcatctcagtgtagtataattgcatatttatccatttgtcctttctactgtattagaatgtcagggtctaagacaatttgccatttatccacattgcctgtcacgtaactagatacagtacatgctcataaatattagctgggtgaatgactttaaacaagtcacttagtctttctgaggcttcaattgctttattagaagagaatacagtaatgccctacctaccttataaggttgttttgggatcctgtaagataatagaaatgaagcttagcatagtggttaagagtatgggttctggatccatactgcctagcttttaatcctacctgtgaccctacaactagctgcgtggctttaggcaagttacttaacttctctgtgttttagttttctcttcagtaaaatgagactaaccacagtatataacttagagggttgttggaggactgagtgagttactacatgggaagtattttgaaccatgcctgaacagacaataaatgttagctactaaatataacatttttatttgtaagccctaaaattatatgtacttatatatatgtatatgtatgcatatgtatatagacagagagagaaacatggcatcagtattactagtttgaatgttttaagggagtaaagactggtatcattattctaaacaatttcttttttctttttttcttttaggataatggcatagctatcccagagtttattttccaagtcttaaattcaaattgtcattcttaatttacatgaaattttggttaaaaaaaattggtgttcagtataagaagagaagtttttaaatgtttcctcgctaaacttgcaaggttttttcgagtctatgtacatagtaggtgaaagttagcattggaaaaatattaaaataaaaaagatactggccgggtgcagtggctcacacctgtaatcccagtactttgtgaggccaaggcaggaggattgcttgagctcaggagttcaagaccagcctgggcaatatggggagacctcatctctacaaataatttttaaaaattagctcggcatggtggtatgtcccctgtagtttcagctacttgggaggttggggtgggagaaacacttgagtccatgaggtcaaggctgcaatgagctatgatcacatcactgcactccagcgtgggcaacagaatgagaccctgtcttaaaaaaagagggagggaagattactgatttaatttataaaggagaattattatagctccaacacctgactttatttatctatatgatttaattacacaaacaattcagtgtttgaattatacaaatttcattaaaactatgtaattatgcaagaaaaataggaaatacaggggcacttagttttgtgcatatgtgttcacctgagagtatttgcttgtttttttaaaaaggttctttttaatttaatatttaattttataatgcacattcatatgttgactttggaccaacagaaatccctaattcttattctttttctgattctttttag

SEQ ID NO: 12 - DNA, 4133 bp, Homo sapiens
  source 1..4133: mol_type = other DNA
gtgggtcagatgcagaagcatatcagtgtttcactttgtggacatcttaaatcatttcatgctttctgtctttcagttttccagttttacaagcattgatttttacattataattaattgcttagaattatctaagattttaaaattgtttatgttgacaaaggtgctataaaatgtacactctgattacactgctctctggagagcattttgacaatgtgtcagaacttttaagacattcatacccttgctcattaattccacacctagacatttattctaagaaaataatcatatatatggaaaattcatgtatcaatttatgtataaataggtattcttgttatatcataggcttagaaacaattcccaaatgtcaactaatagattagataaataaattatgaaacatccatcctctgtaatgctgtataaccattaaaatcatggattacaagcagtatttaatgacatggggaaaaggacacagaagaactggaagaaaataaattttatcaatggttttgttaggattctctagagaaattgaacctatagggtgtgtgtgtgtgtctgtgtgtgtgtgtgtgtaagtatatatatatatataaacatatgtatgtgtggggagagagagattgattgatagattgattatagggaattggcttacatgactaaggagtctggaaagtccagaatctcagtgggggctggtaggcttgagacccaagagagctgatgttccagctccagtccgaaggccagtagcctagaggcccagaagaaccagtagtgcagaagtctggagactgcaggaggattctcccttgttcagggagtcttttaggccctaaactgtttggattttggctaccacattatagagggcagtctgctttacttcaggctcatcactctaacgttaatatcatcaaaaacaccctccaagttaacacataagattaatcatcagaatgtttaatatatcaggtgatgggtttatagctaatttttactttcctctttatgtatttctctattttctgtattttctgcccttacatacattatttttataacatattagacccttcaagttataaggagtgaagattccctttggttacctctaagggttggacatactttgtagaataattatgacagacaactttggctgtgtatccaggcttcatacaagaatataagatagctgcagaactggatattgtaaacattcgtgggcattttggaatttgaaagatcatcagaatccagcatagccctagtgacctggtcatctccttgcccccactatcccttcatcaccaagagttctctactctatgtttcactgtaaaaaggacttggctattttctcttatctcagtgtttgttggctattttctcttatctcagcatttgtttcagtttctgctcctactaccaactgcttcactttcattaatggcttctcaatcttattacacgtcttgaatttaaactcgtgaataaaaagatctggttgtcttcattagtcaaagtcaaagggatagagttagtccctattcagtagagcttttctagctggcaacttcatgtgcgtgtaccatcctggatgtggtttgtccttggttcaggtgctcacttcttcagtcacttgtggccaagatggtataccaacccataacttaggcatttgagacaaagtctcactctgtcacccaggctggagtgctatggcacaatcctagctcactgcagcctcgaactcttgggttcaagagatccttctgcctcagcttcctgagtagctgggactgcaggcatgtgccaccatgcccagctaatttttacattttgtgtggagatgggatctcactatgttgcccaggctggtctcatgtatgttgcccactccttgtctcaagtgaaccttctgtcttggcctcccaaagcactgggcttacagatgtgagccaccatggctggctcaaacaaaatctttataaaataattactttaaattgtttttctctcaatagtagatcttttcagcatactttcaagtttgtgatgtttgttcttgctcctctataaatttatttttgtgggttaattatcaaaatttttgagtttaggaatagatttcttaaaaactaactttctcttatctgggcatattctctgagtccattatgcctctcacagtagctgttgaaaccttgtttgtctagtgtcaggcactgggcgtcagcattgtctatggtttggcagtgagagcataaatctggttccaggtctttgtggcaaagtaaggaaggaaatggctttcagcacctttgtttgtttaagaatgtttctaattttaggctcctgcatttgatgttgcttatataagtttatgagcaatttttattccttcttaatatatttcatagctaatttattttatttttttattattattattattttttgagatggagtttcactcttgttgcccaggttggagtgcagtcatgtaatcttggctcactgcaacctccgcctcccgggttcaatcaattctcctgcctcagcctcctgagtggctgggattacaggcatgcaccaccgtgctcagctaattttgtacttttagtagagacaggatttcaccatgttggccaggctggtctcaaactcctgacctcagatgatccacctgcctcagcctcccagaatgctgggattatgagcttgagccaccgttttatagctaatttttaaaagtaaacatattgcaaccatatagttaactagtatcacttaaataagtgctgtattaaatttcaaaattttctattccattctttccttaaccgacagacataaaattattattaaatcctaaaagcataatttcataatttgatatttcaaaaatataccttatggatttattctgatatttgtggcaggtatttctaatagctttatttgtaacaatgttttaggaggactgatacgagtgtttaactgtataatttcttgctgtataaaggatagctctactgtctactatatatcatatggaaattttactgtttataataccttcacaatactgaagttaatcaaataaaaatttacttattttcacagcataacacaaccatcactataaaccatacttatttttgttctatagtattggttatttcactgacatcagagatttttacccaattaaagttaaaatacaaattgatgaaaaacccaggaaccacctttaatatgtgaagattaaaccaaactaaattatcattattatttaatggactgtctccaatgtctggctacttgttggatgtgtccacttagatttctggggatcctttgaagttatctggaattttgaatgtttttatgtatgtgtgcatttggggtagggtccgttgctttgattagattttctatggagtctttatctttttatgtacccttttcccatcccagatcctaagaagcctcagtataggaactgtgtctttctcttcctgcattgccagttgataaattacaccctcaggctagatgcagtgattcatgcctgtaatcctaatactttaggaggctgaggtgggaggatgactttagcccaggagtttgagaccagcctgggaaatatggcaaaactgcagctctacaaaaaaatataaaaattagctgagtgtggtggtgcatgcctgtggtcccagatactcagtggtgttggggaagaggggtgctgaggcaggaggattgcttgagcctgggaggttgaggctgtagtgagctgtgattgcaccactgcactccagcctgggcgacaaagcaagaccctgtctcaaaaaaaaaaaaaattgtaccccagtatactttgataagtgctcagctcacatctttaccgttcataatgatgccagctggaacagccaaatcctatattagatgctttttcttggtagccttaggaggctttacagaaagtataaaataaaacaaacttttattggcatgatcattcatctgggtatgaggtatttggcttaatactgatttgacaagtcctgttgtgtggtgatagtttttttctccatctgcag

SEQ ID NO: 13 - DNA, 14318 bp, Homo sapiens
  source 1..14318: mol_type = other DNA
gtaagtggtgttataaatccctttaaagagggaaaaactctacaacaaaaaagaacattcagtcataaataaaacatactgactggattttcttagcttttgtttcgaatgattataaaaccataatgggcattatatagtattacataatgttaattatatcgttgaggttatgttgagctgctaattccattcacttaaagaccaaatgtagaagagtgaacatctgtaaagttaaggctttttaataacattatgaacttgatggttacatgtaagggttatcttagaccaaatcaattagaagcaaatggaatcaagttgtttatctgtaaatatctcgtggttttggaaccataatattgatgacatactgttgatgctgtatgccggagtcattcctgtctgtcatccttacatttttcaagacttggggaaattatggataataaatgttctaggtgggtctgtccaggtgtttttgatctttttaccaatgttgatttgcctcctagcagctttcaatttttattttcatgacacttcagcaatttttttggggaaaaaaaacagtttcaaaattccaggctttttttttgtttaattttgcatgtttctttctgcagaatcctaattactttttcctttttagcagaccgtgacaagagttggaatatttaatattttaaattaaatagcattttaatttgtaactcattatacaatgtgtcatcaagatttagacatgtaaaatgtatatcctattttctcatatcagacaagcatttttcatcctataattgataatcatataattcataataattcacatttggtctataaacttcatggtgaaagtaagttatgaaaataactttatgattattcttcattagctaaattgttcttcttgctccttttgaccacagttatttgatgtgatttgaatcatggtctttatagtctcctcattttatttcatccccaaattacatttctttgttgttctattttttttatgtaatttggaatttttcctagaatttccagtttcctttgattaatcctattttcatcatgatttctaagttcttatttggaataatgtttttgtttttatttcacattctgtgattcttatgaatgttatcaagatatgaaaggtttgtcactttacatttctttgtcatagagtacttttaaattttgtgtatttgagaccagcctggccaacatggtgaaactccatttctactaaaaatacaaaaattagccaggcatggtggcaagcacctgtattcccagctactcaggaggctgaggcaggagaatcacttgaacccaggaggcagaggttgcagtgagctgagatcatgccactgcactccagcctgggcaacagagtgaggctccttctcaaaaattaaaataaaataaattttctatagttttgggattgatcccactaaacttgggaacaaattgctgactctagagtagactggcacactatagtgacctgatagacaccaatgcgttcatcagatttgtgtctttatttgagctggttcatttcgggcctttattttaacaatttaaggtaatttcagatttggttctgtaattctggtttctataatttttattgtgtgaacattttttaggggcttctacaacatttgctaactctacatcaggataataaaaaataactattgtgtttgtttttgcattgaaggtcattaggtgaatttacctacctttaaacatcttccatgacaaatggttatgtttatttaggcaatttttttaaaaacctagaattaccagtattagttctctgctggagttggacactttaataaatggtaaaacttatcccattcgtacctaaagggcaaaatcagatatccaaatattttatttattttctctgtgatactgtaagttaaataggatagccatgatatagcatataaagccttcattaatggctgggcatggtggctcacgcctgtaatcccagcactttgtgaggctgaggcaggcagatcacttgagctcgggagttcaagaccagcttgggcaatatggcaaaaacccatctctacaaaaataaaaaatagtggccaggtgcggtggctcacgcctgtaatcccagcactttgggaggccaaggcgggtggatcacgggaggtcagaagttcaagaccagcctggtcaacatggtgaaaccctgtctctactaaatatacaaaaattagccaggtgtggtggcaggcgcctgtaatcccagctactcaggaggctgaggcatgagaattgcttgaacccgggaggtggaggttgcagtgagtctagactgtgccattgggctccagcctgggcaacaagagcaaaacttcatctcaaaaaaataaaaaataaattaattaattaaaaatagaaaaattagctgagcatggtggtaagtgcctgtagtcccagctactcgggaggctgaggtgggaggattgcttgtgcccaggaggttgagactgcactgagcagtggttgtgccactgtactccagcctgagtcacagagtgagaccatgtctcagaaagaaaaaaaaaaaaatccacacataaaggcctcattaagctggataaataggatcttaaatttatatgatgtcagcaatttcaggcctgctctactaaaattaggatgctctgaataatattcccaagacaccaataatatatgtaataatcaaatatattatcccaattggatataaaatgttattttagctctttttattttccacttaaaattaatacatagaaaagtgaaattacttttcataattcttcatgcaatatgggctccagttatctattgatgcataacatattaccccaaaccttagtggcctgaaatagcaaccgtcattttcttttctctcacagtttctatggatcaagaattcagaaaggaattagttggacagttctgacttggggtctgacatgtggtttcaggcagtggtggcttgggttgaagcaggtaggaactaatcaggcatctgtctttattcatgtagtctcaaggtgtctgtatttgtccattttcacactgctataaagagtacctgagactgggtaatttataaagaaagaggtttaattgactcacagttccacatggctgggaggccttaggaacttacagtcatggcataaggtaaaggggaagcaaggcatgtcttacatgatgtcaggagagagagcacaggggaagcaccagacacttatcaaacaatcagatcttgtaagaactcactcaccatcacgagaacagcatgggggaaaccaccccatgatccattcacttcccaccagctccctcccttgacatgcggaaattacaatttggattacaatttgacatgagatttgggtagggacacagccaaactttcatcacacccccagcccctcacaaatctcatgtccttttcacatttcaaaaccaatcatgcctccccaacagtcccccatagtcttaattcattccagcattaactcaaaagtccaagtccaaagtttcctctgagacaaggcaagtctcttctgcctatgagtctgtaaaatcaaagacaagttagttacttctaagacacagtgtgggtacaggcgttgggtaaatgttcacattccaaatgggagaaattggccaaaacaaaggggccacaggccctatgcaagtccaaaacctggccaggcagtcattaaatcttaaaactccaaaatctcctttgactccatgtctcacatccagggcgcactgatccaaggggtgggcccccatggccttgggtggctctgcctctgtggttctcaggttacaacccctgtagctgctttcacaggctgatgttgcctgcagctttttcaggtgcagggtgcaagctgtcatgtggatctaccattctggagtctggagggcagtagcccccttctcacaactccactaggcagtgccctagtggggactctgtttgggggctcctgtgccacatttcccttccccactgccctaacagaggttctctgtgaggtctctgcccccgcagcagacttctgcctggatatccaggcatttccatacatcctctgaaatctaggaggttcacaaagctcagtttttgtcttctgcacacctacaggcccaataccatgtggaaaccaccaaggcttggggcttgcgtcctgtgaagcaatggcctgagctgtaccttggccccttttagcccagctggagctggagcaactgggatgcagggcactatgtcctgaggctgcagagagcaggggaaggaggggggagcacaaaaccattttttttctcctaggcctccaggcctgtgatgggaggggctgttgtgaagacctctgacatgccctggggacattttccccattgtcttgggcactaacatttggctcttgttacttatgcaaatttctacagctggcttgaacttctccccagaaaatgggtttttcttttctaccccatggtcaggctgcaaatttttcaaatgtttatgctctgtctttcctttaaacataagtcccgatttcaaaccatctctttgtgtacacacatggctgtatgctgttaggagcacccaggccacctcttgaatactttgcttagaaatttcttctgccagataccctaaatcatctctctcaagttcaaagttccacagatctctagggcaggtgcaaagtgcccagtatctttggtaaagcatagcatgggtgacctttactccagtttccaataagttcctcatcttcatctgagaccacctcagcctggacttcattgtccatatcattatcagcatttttggtcacaaccattcagtaaatctaggaagttccaaactttcccacatctttctctcttcttctgagccctccaaactgttccaacctctgcccttgacccagtttcaaagtcgcttctacattttcagtttgtctttatagcagtaccctactatcctagtaccaattctctgtatcagtccattctcacactgctataaagaatacctgagactaggtaatttataaagaaagaggtttaattgactcacaattcctctgggtgggaggccttaggaacttacaatcatggcagaaggaagcaaggtacatcttacatggtggcaggagagagagtgaacttaggggaagcattagacacttataaaacaaccagatcttgtgagaactcactcaccatcatgagaacagcatgggggaaactgaccacatgatccaatcacctcctaccatgtccctccctcaatacgtggggattaaaattcagattacaattcaagatgagatttggttgggccacagccaaataatatcagtgtcttagttagactgggctgccataacaaaataccatagactgaatcctttaaatgacagaaattaactttttcacagttgtagaggctgcaagtccgagatcagtgtgccagcatggttgggttctggtgagagccctcttcctggcttgcaaatggccccttcccttccctgctggcctttcctcagtgtgtgcacatggcacgggttgggaggtggggtacaggaaggcgaggggagagagacagggagaactctccttctcttcctaaaaggccacaatcctgtcagattaagaactgcccttctgacctcatttaaccttaattacctgccaaaagcctatttacaaatacagccacattggggatagggcttctacaaaagaacttgaaagggcacagttcagtccatagcgcagagcgtctccatgtggttcatttgtgtgggttaatttgggcttccttacagtgtggtggtatcaggatggtaggacttctttcatgagactcagtgctccaacatgagtgttccggcaaggcacatagaagctactttgcacttatgtgctgtcacggaagtcacatgacatcacttctgccataccatatgggttgacaagtcaccgcattctgcccagattcaaggaacaccacatctcagtctggggagtatcatttaattggcagtcatgtttcaaaaccttcaaaataggggaggaggtggggatggttaatgggaaccaaaaggaaaaacaatagaatgaataagacctgctacttgatagcacaacagggtgactgtagtcaataatgacttaattgtacatttggaaataacaaagtataactggattgtttgtaacacaaaagataagtgcttgagggaagggataccccattctctgtaatgtgattattacatattgcttgcctgtctcaaaacatttcatgtgccccataaatgtatacacctaccatatacccacaaaaaatttttttaaaaccttcaaaacaaataatttgttgattaaatggatggaagaaattacagtagaggataagactaaccggtgtgttgtggtcctctccctcccagtgtatgactactaagactgccttacatttgtgtagcaatatgactcatataaccttgattccaatcttatgagataggcttttttataatataagtggagaaactgaagctcagaaacaataactttccaagagccacatcactggtgggtaagtgcttgccagaaaccatgtagactgtttgttaaacccttcaagggagggaggtatcatgtttgattctattttgcacctctggcagagtgcctgataaaaagcaagcattcagtaaatgttcatcaaactaaagtgagaaaccagttagtggcagatccagaaaataggccttcggtaattgctgggacataagttacccatttggaaaaataaaataaaattgaatgtcttcctgacaaccaactgaaaagcaattcctgatggattaaagtcataaaagactagagcttaaagcttctagatgtctgtacaggaagatatctttatgatatctgggcagggatatatttattaagacgcagaaactgctaactatgaaatataaggctaataaacttgactatgttaatataacttctattcataaggaaaagtgaaaagagttcaaatactgagaaaataactttacaaaacatgaaaccagtgatgcattctaggatatataaagaactactacaatcaataacaaagaaacatcccagtagaaaaatgggcaaatgatatgtagaaatatttcaacagaaacgcacatagcaatcaaatgtatgaaaagatgttcaattttattagtaatcagagaaatgcaaatgaagaccataataagttaccattcttcactcacaagattggcaaagattaagaaaaccaacaatgccaagttatctttgtggatatggatcaacaagaatgtttgtgcactgcttctaagagtataactgattcatcaccaagttggagaaaaacttagtattagaaagttggagcttacattctccacaacctagcacatcctcccactcccacctcagtatttacctagagatacctttgcatttgtgcaaggtaatattgaacaagtgttcatagcaactcagattcccatcagcaagaaaatggatctataaattgtggcacatttatgcaatggaatattttatagcattaaaataaataagtataacaacatggaacaatatagttgaatcttagtaaaagtgaaggaaagaaactgcagaatactgcatacaatatgatactttataaagctcgaaaagaagcaaaactatacaatatataagtggtaaaactggaaaaaatgtttgtcacaaaattcaagagagtagttattttttgcacaggttacctgttgcataagtaaatgcaacggtattattaatgtcctattttataagttgaagggtggatttaatttgtcctcactacatatatatagttatatccatttgcagatatcaggttacacataaaaatttaacatatattaaatgtatccttaattccactaagaaaaaaaaagagaaaaagcagtgaaaacaaggacttcctcatccttttaagctaaaaaaatggccaagtgtcagaagccagcaattatggctgcaggtattagtatttcccaattctgacaagggcttctcaattgttggcttttaaaaagccaacaaacatccaagaagatttcatacctgctctttccagccattttggcgagaaaaatgtacagtgtcttcatgtcaaaacaatcaggcatattctattccagtggcctgctaaggaataaatgcacaagaggaattctttcatgaaatagaggctgaattatgcaagctaaatttgagaagtacagtgatctattgtaatattgtttatttattttttttagagcggcaggctttgatcttgccaattcatcttagccaattagtgatttaaataggaaagctttaatgttacagtgcagatgaataggtcatgagattaagtatatgattttaaacattatgtaatctctcctacttgaccagccatggagacccagctccaaattaaaatacaagaaccagaaccgaccgggtatagtggctcatgcctgaaatcccagcactttgggaggccaaggtgagcggatggcctaagcccagaagttccaaaccagcctgggcaacatggcaaaaccccgtctctaccaaaaatacagaaattagccagtctcataacccagtctcaaaataaataaatgaagagataaaaattttaaaattaagtttaaaaagaaccactaccttaaaacaatgacaaaaaaaaaaaaaagatatcccaaattcatttacaatttcattccttttattttccatgtcttcttgatttttgaaatatgtaagtgtagtcattggtcataatcaatactactaaacttacaatttttttggggtcttaaaagcctagggatccagatataaagcatcaattaccttggcttagtttccccattggctaggcatccttcttttgtgcccctcttttttccaagtacttacctattttttaacatgatgtgtgatattgatgttatctattaatatgtctttcttttccttcatgtgacttaaagctcttcaagaatattcctttttgtttccttagtgccaggaataattaggagctcagtaaatgtaaatgtgtgttgaactgaactagccccaatgaaaatgtatcttcatgcagtgtgatgcctcacttcagcaaccttacgctgtggctcacacagaagcagtgaatcttgcgatggcatattgaattagtagtcagcaagcagtgctggctgtatccccctagcccaggagtgcagacaactacctaagaatgtcctcttcaccatgtagtaagatagcaactttatagtaaatgtcatggactggggcaggggcaagagggagcagaagaactaaattacaaatataatacaattagttatttctctattttagtttaatttttttggtttgggtttttgtttttttggttttggggtttttgttttgttttttgtttgtttgtttgtttttcatttttttttttttagaaacagggtctggctctgtcacccaggctggaccgtagtgacgtgatctcagctgacttcaacctctgcctcccaggctcaagtgattctcccacctcagcctcccaagtagctgggactacaggcacacgccaccagacccggctatactctgttatcctattataattccttagcaaattcaaagttcctaattcttttttgttttttttttttttaaatgagcagggtctcacgctgtcaccttggccagaatacagtggcacagtcacagctcactgcagcctgaaccacctgggctcaagtgatcctcccgccttgtcctcccaaactgctgggattacaggcataagccaccacacccagccctgaattctattttttttttttttttttttctgcaacaggtcctcactctgttgcccaggctggagtgcagtagctcaatcttggctcactgcaacctctgcctcctgggcccaagcaatcctcccacctcagcctcccaggtagctaagactacaagcttgcaccaccatctccagctaatttttgtgttttttagttgttgtagagatgaggtttcaccatgtttcccaggctggtgaactgagctcaattgatccacccacctcagcttcccacagtgttgggattataggcgtgagccactgtgcccagccctgaattcattttttaaatgatattcagagaaatatactatcttaatctccatagttcttttaacggcattgtaatttctcctttgtataatacagaaaatcccactggaataattttttatttatagattttagaaacagaaaatataaagttcttgtgaagaaaaagacaaagtcatgagacggaaggtggggagggtttgggggaaattaagaaactcaatatttggccaggcacagtggctcatgtctgtaatcccagcaggttgggaagccgaggcaggtggatcacttgagctcaggagttttagaacagcctgggcaacatgattaaaccccttctctacaaaatatacaaaaattagccagatgtggtggcatgtgcctgtaatcccagctacttgggaggctgaggtgcgaagatctattgagcctaggagttcaaggctgcaatgagccatgatcacaccactgtactccagcccaggtgacagagtgagaccctgtctcaaaaataataataataatcaactcaatttttgtgataaaattttaaagaatgattaaggatggtaatacagtagtatggtacattgggaaaaacattaaaatagaattcaaagttttttttttttttttgctgtttttaaccattagatagctatatgatcttgggaaaatcatttaacctcagttttcttgtctgtaatatgagtatataatcatacttgtgagagatgcagacagggagagagaatacacattcatattaaaactctttgttacaggaggaagttagcggaaaattaaatcttgtcaccacagagactaaaataaggttccatactgtcagatcatataaatttaaaaatcacttctaagaactttagccttctactctataagcagaaaaacttcacctaaagaggcccatggcctggctgagattcaaggggagaaatttttgttaggaaggaaggtgcaattacagcaagacagtctagaagtgttggctgattccctcttagaaaatccttgggcagtaattctgaccttgcctggagattgtaagagaatattactatgatcagctctgggataggaatgtgcttaagtagcacattttagaagtgccttactcctaccaaagaactctggggatttcccaagacctgtgtctgcctagcaaggagtgtctggttataatagtcagatttctgttgtgtcatttttgtggtaagttaaagatttcattacagttaattagtcatacatatataaattatatatatatatatttttttttttttttgagacagttttactccgtcacctgggccagaatgcagtggcacgatctcagctgactacagcttccacttcccgggttcaagtgattcttctgcctcagcctcccaagtagctggaattacacacacatgccaccacacccggctgatttttgtatttttagtagagacggggttttgctatgttggccatgctggtctcgaacccctcacctcaagtaatccgtccaattcggcctcccaatgctgggattacaggcatgagccactactcccagcctaattagtcatattttaattagacctaattccgggctgatttttctcagaatatccttctacctgtttgcacctgtgtcatttattttgggaataagtagttttaactttaacatagactatgagttttgagttcatatcctgaatgtattttaggctttctgaaagagcagccctgctacatgctgatatggcagattgcagtctacctagtatgagagcccatcctcattaagcatagccatagggtaggaattctgcattcttcagctattgaggctttgtcatgagtctgtgtcctgagctcatggccaaatgtggcccaggaacccaggtacacacacggctgtccccctgtagccttagcttctcgctggctcctttccttgctgggatggccttctgctctggtccttagcctgctcgcctgggtccttaacaacttacccagctcttgccaggcccttctcaccagggattcctcccaagtcccctgcacataactacagcctggattctccccagctctacagcttgcagtatcacactgtctagagactcctgttgctgtgcttcacactacaggacagacttcctggcgctactaaaggcagcctagatcaacccaagttaatcacatccgcaggaacactgtgattggagctgctggccacccctgagggaaccagcccatagcccagttatctccctggccattgtgggtttcctccctttgcaggcacctgctgctagcatcccattgtgcactgatactagctagggagggttccaactccagtcatgccagcatgcacaaattctccagggatacaaagggaggttgctgtagaaaaaggagcctaactattttctgcctccactgaggataacctcagagtaaatatatgcacaacaaatgccttagtactgtaacataaaattatttgttggccaggcatggtcactcaaacctgcaatcccagcactttgggaggccgaggcaggtggatcacttgaggccaggagtttgagaccatcctggccaacatggcaaaaccccgtctctactaaaaatgcaaaaattagctggacgtggtggcacatgcctgtgatcctagctacctgggaggccgaggcatgagaattgcttgaacctgggaggcggaggttgcagtgagctgataatcgcaccactgcactccagcctgggtgacagagcaagactgtctccaaaaaaataaaataattttttagcaggcaaagtgagatacagttggctgtattaagtagtatttagttaaaatacaactctgttacctgctgcaacaaaagatatacaattacagaattattgcagcacagatctagcaccaacaatctaaaatgcagtctctaagctaaacacagtccttttacagatttaattagttgggaaattagggatgctcagggttgaacagcctgggtctgtcatggagagaatctttaaccaatagaaggcctataaggctttagaaacaagtccctcattggctttcaaccaaactgaatccattacacctgctgaatctgtccagagtccatttcttcttaggaaccactaactacccagccatccagatgtgccatgtgtattctgccacctgctttagagaaacatctggtgtctttattaccttgctgtggctaggggagttttccattcccctccatggccctctgttcttttgagtgagtgttgtttgtgctgctgcatatagattcaaatttactgtccagctttcctccactttgtgcagtgctgactcattttccccagatacttgttcctatgcggcttgctgtagtcccttgatctctcttggcaaatgacagtaaggcatttttgaagtgttggaaggcttttgctcgggctttatccagctctccccgtttggtatattggcaaaagagtcccactctgcatttgtgtagaatttacccattatttctattcctgcctttcaagtaggaaccaggttagcaaatgatagaaaattaaatccagatgatttgtggtaagaaatatgttttgtgaaaaagaccactcagtcataaagaatgctcagaattagattatgcaaatgctctgttatcacactttcaagtggtacaggcactgctgattttgattcaaggcaaggaaattctagttagctttttatttatttaatgtttctgttttaaatgagcaggagctcactaaagtataaaagaaattaggtcttcaatagggcctgcctcgtaatcacctatgtgcttcataacccaacggagatgatgaataaatttgctgtggcctcatagtttataatttacctgtgcactgtttcaaccgaaatggttttcatgctctttaatttcag

SEQ ID NO: 14 - DNA, 2644 bp, Homo sapiens
  source 1..2644: mol_type = other DNA
gtgagtttatgttttcttttcttatcagaaaaaaaaaatgaataaataaaacaaaatactggttgaacatccctaatccagaaatccaaaatgctccacagtctgcaacttttgggtgccaacatgatgctcagaggaaatgctcattggagcatttcaggttttgtgggttaggcgtgctctactggtaataatgggaatattccaaactccagaaaactccaaaatctgaaacgtttcaagccccaagcatttcggataagggatacccaatttgtgcaacaaaaaacagaaaatagggaaacagatgggttgtaatagaataacctgtaatacaatgtattttgtatttagtggttttaaattctacaactcctgttaacctcatggtgacagacaaacaactgataacttaaaattgttctttaaccttgtacaagttttatttatttcatgtgtgttgagcttattttcccttccctgttttacattctttaagagctgttctcaggtcttagtagttgatttgtcttttcactcccttggtcatacagagatggggcactgattataaaatccttaccgatggagagttttaaaaccagcaccttggaatggagtatcctatgtttaacacatgccccttaaaagatgagagattagctgctgaaagatgcctctcaaactttttcttttgtctaatgccagtcaagtcttccaggttcaaaaataaacttggctccagaattaacctttttcttcttggaaaggaaatatactccatgatttatttccaggtcattcttctagccagcaggactggaaataagtttggaagaaatccaaatcaagtgttgtcagcatgttagctataaccacaggcaccactgagatatgggtacctttctcccacgtaaagccctttgatcaccttgtatcctcttccttcactgagttagaggagaaatgtgattgatctcacttacctgaccctttgtcttcctggtcaattcttaattctgtttggagcatgaacactgtattagttaagatatgtttggttgcagctaacaaaaccctgtttaaacgagagatttatttgcttgtataactagaaggtcgaggggtcggtgagctgcatgggttggtttgatcctgatgcacagtggagtcattggccaactgatttttctatttctctactgtgtcttcctcagtgttagttttatctaaagggtggcttcctttcattcctaaaatggctataaatctaaaaactccaccatccagaaagacatagagaagccaccagtaaacctctcctcatgtcttaatggcccagagtggatcctgtggttaatcctgaattcccttttagtcaatggaatacgaggcctgggttatctgaacagtcctgagggcaatgggggtggaaggatggcccaactggtgtagaagtcacacacctagagttgcagataggatcaggtcctatgtgaactacatgggcgctgcaaagtggggcagaggtagaaagggggttgagggagagtatcggaaaacaccactgaacagtgcgttaggtcagtagtctcaaatttagtgtgcatcaaaattacacggagggcttattaaaactctgattataggactcgacttttaagagtttgcacttcagtaggtttagtgtgggggtcccaagaatttgcgtttctaacaacttccctggtgatgctgatgctcctagccagggccacactttgagaagcagtaaatttcattatgtaacattgttagaagaatgggacagattaataaaattgtatctttttttttttctggtggtttccttcttattgcttcatttgatctcccacctaatactttttatgcaaatcttagagtctataaatcatctttttttacaaaagctctataaaactaaaacatcaccttttccccgaagcaacaatagaatgaattattcagctcttatctcttggtttacttcataaccagatgctgattactgaattaaaattttgaattggaaacaattagaaatttgctaattggtaatgcactgctagatttattcattcactcagaaactatttattgtgtatgtactatgtgcaatatattgtgtttactgtacctcctaaatttattcttcaaattcacaactaatttccaagacaccaccaggcttgcctttctataagtgctacacacagatacacgtggacatgacatagtggactgcagaaacctgttttatcaagcacatctctacagaagtacttcctggagtttgggcacagaagtcaatcttcatatgaaagtgaaacttactcaattgatggtgataaaaatgagttgtttttttcaaacaattctcctgcctcagcctcctgagtagctgggattataagcacacaccaccacatccagctaatttttgtatttttagtagagactggctttcaccatgttagccaggctggtcttggactcttgacctcaaatgatccacccaccttagcctcccaaattgctgggattacaggtgtgggccaccgtgcctggcaaaaaatgagtttctttttattgctaatgccctgtatttttatcttcctttcag

SEQ ID NO: 15 - DNA, 979 bp, Homo sapiens
  source 1..979: mol_type = other DNA
gtaagttttattatttttctagattaaatcatataatttaggcaaatagtgttacctcacagtttgttttactttccagatacaaaatttctaaatcatagttcaaataattatttaaaaaatgatccagtacctaagtccaccaccccttctacagaagagacaatcaaaccaaccaaaattagattttaggctaatgagggtatataaaatttctagagacagtccagaggggacttaataatcttttttttttttcataatttttcttggtagtttatagttgtgtttaacagccttcagtgccttaaaatttttttttgacttgcattgtttcctgcattgtatcttaaactagtctcttcttactcagtcctgggtcttttttcttttcttttcttttctttttttgagacggagtctcgctctgttgccaggctggagtgcgatggcgcaatctcgcctcactgcaacctccacctccctggttcaagcaattctcttgcctcagcctcccaagtagctgggactacaggcatgtgccaccacgcccagctaatttttgtacttttagtagagacggggtttcaccatgttggccagaatggtctcgatttcttgacctcatgatccacccacttcagcctcccaaagtgctgggattacacgcatgagccactgtgcccagctttcctgggtctttcttcacttaattttgcctgttctccactgaaacatcatttgcacaagtttactgaaacctgttcatattttgaattgccgtctcccaaggcacctggcctctaacagccaccccaattccagcaacatcaaaatgatatttaaaggattgtcattattttacttgaatttcaattactacacaaaattcctagagctaccaaaaggcaccatgccaatactaaataaaccagcaatgagtggaaaatttgatatatgagaaaatgattttttgcag

SEQ ID NO: 16 - DNA, 4353 bp, Homo sapiens
  source 1..4353: mol_type = other DNA
gtattataaatgtttgtctttcttttgtttttaatggaatattttaagaaaagggtttactttgttcaccagtgtcaaagtcagctcagagactgatattcctgtgtgtgcactgtatctctaattcctcagacttacaagacttttagctttttcattgctcattgacaacctgcttggtgtggtcacaggataagctgttctaataaaaatagaatggattaaataaattagaattctgttgctcctctcctaaatcaacaatccagcactggtaagtcctgctttaatatgaaaaagaaaaaaggaagaagtagacagggattctcagtcatctagccagttctaccgtgatctgcctctctagctatccaagtaaccatgaggacccttttttccttacataggacccattcaccatttgttaattcccagttactgcctgaagctcaaagaccaggatctctgggtgatacagttcttcctggttgtagcttctcataatccagcaaactataaaaggaagacaagttatcagctcctcacccccacaccctcccccaacactcccagtgatggcataggaaaagaataaccgcactgaaaagtcccatttggaaaaagaaagactgggaaacatagcaagctcatagcaattttctaaaattttcaaattcctcaggaactgggaagattctgtactatggtgacgtttcttggttagcttgttggactaaacttgggtctgctttctcataagaattcctttatcaattttactccatggcccccagttttgcccacagggaattgtttttgtccattatccttgatgaccatatcttgggggactgctggtcctgctaatgtcaggtagaatcccaagggttgctttagggatcaaataatccaaacttttgtaggccagacttacgatatctttggtaatacagcctcctcaaaaatgtaggtttgttgtctgtttgctgctaatcagatgcatgtcaaaataactatacccaaatatcacttttggtcatagttcttaaacttgccaaatcttatatactgtcttctgaatttatccatctcactcttcctccatttaatgaagtctgctttcaggccctctgaacatagtgagcttgtggaggaaggcagcattctcaaattcatgtctgcagttcagtaactcggagtgacagccttttctcttaacactaggaacacagagcaattggcttttccaaccatctgaagattgtaggccataggcagaacctccctgagcagaattcttttccttccatctttagaaactggccaattctcacccaagcttatctctcccatgtaatctttcaaaaagcaacaaatgccaaaaaaacacctcccaacagtattagctttcccaaacaattcctctaggctaagactcagtaggtacatggcctgctgtctgagttatggcaagcaacagttttcacaaatgcccatggtataatgagaacctgcttcccagcctgcaatgtctgggtccttaccttccattcctgtacatttttcatttttattgttagtaccacccaatttctggtattaatctctacatatgttagggtccaggctaagggacttgacagaagtcaaaagcacagttaactcaaataagataaaagttttatctttccagaaagtagattagaggttaccagggaatggggagagggaagactgaggagttaatggttacagagtttctgtttggggtaatggataagttttagaaacagatgatggtagtggttgcacaatagaatgagtattattgccgttgaattttacatggctaaaatggcagattttaccacaatttttttttaaaagatttgtcttataactgtaagtcaagaggtgagtggtccagaggtggaagacagctctaccatcctcagggtgtggctttcagggtcattgaggtcatcttcagttcacagccagcaaggcaaagatctatcagacatgacccagaaatttcactcatcacttcattcacatcccattgtcccattgagtatcacatggccacagctggctttgaggaaggctgggaaacgtaattaggtaaccaagtgtccggcaaaaattcagagttcagccaggcacagtggctcacacttgtaatcccaacgctttgggaggccaaggcaagaggattgcttgaggccaggagttcaagaccagcctcagcaatatggcaagacctcacctctatgaaaattaaaaaaaaaaaaaaaattcagagttatattactaaaagaaaaaatgagagaacagatattgggagaaaattggcagtctagagagaagatctggagaaactgcaaaaaatgaaagaaaaatctaattaaactatttaattttagaacttggagaattacattatgtatgtttctcttctatgttttccattttagttttaaaataataataattataacagataattatatagtgtttggttatgtgccaggcatttgtctaagcactttacatatattttcatttgaatcttcatgattactctccagtgtatgtatttttattttccacatcttgcaaatgagaaaactgagggtcagaaagctccagaatttgcccaagatcaggtaactagtaaatggtggaaccaaattttgaatgcaggtagtgtgacctcagtgtgtgattttccttagaaaccagtctataaataatttgctgatttgattattggaatcagttttttcttttactttaacatttacttacttcctctaggagaattacttttatttcattgctaagaaaataataaaataatatcaatttttgtatttttaatacaaataaaatataaaagatatttgtaatgttaatttgggaaaaatccctgaaacatttttaaaagcagaattttatggtgccttagttcatttgtgctgctataacaaaataccacagacgaagtaatttatgaacaatagaaatttttcacagttctgaaggctgagaaattcaagatcaaggggcatcggcattcagtgtctagaaagggccttttttctatatcctcacatggcagaagggggaagggcagaaaaggcccaagttctttagctgtagcccttttataaggcactaattcattggtcaattcccaaaaggccctgccatttaacactacctcaaaagggattatgtttcaacacatgaattttggggaacattcagaccatagcatgtggcattaagtatattcacattgagaatatgtttatatttttctgcagccatcacctgtatccacctgcagagttttttcatcttccttaactgaaactctacccattaagcattaactccccattatcccctatccccaggccctggcaattactattctattctgtgtctctgtgaatttcactactctaggaacttcatataagtggaataataaaatatttgtctttttgtatctggcttatttcacttagcataccttaaagggtcatccatgttgtagcatgtgtcagaatttccttccttgtaaaggcagagttatattccattgtatatatataccacattttgtttacctgtatatctgtccatggacacttgggttgcttccatcttttggctgttataaataatgctgctgtggacatgggtgtatagatctctcttcgagtctctgctttcaattatctttgttatttactgagatgtagaattgctggatcatatggtataatttttttaggaatcaccataccgttttctacagcagctaaactactttacattctcatcagcaatgtgcaagggttccaatttctccatttcctcaccagcacattttctatgtttttaaaaatagtagccatacaactgggtatgaaattaaaaagataaattttacgttatgtgtattttaccacaataaaaatgtccaaaggaactgaaagtaccaatatttggtgcagttctgtcagtagaagtaaatatggattcgctatattccttaaaaatatattttcactctaagtttgtagcacctacaattttattaagacctcatagttctgaagtttaaaaagtcataaattgtttcagaaataaaacgaaatcatgaatccaaaaaaaaaaaaaaaagcctataacaccaaaatggaaccagaaatttaaatggtctaaaaatatttgataattttacaaacctaaaaatacatacagtaattcttccttttagtgctttggatcaaattattgattagcctttattttgttgctgttgtttattactag

SEQ ID NO: 17 - DNA, 2207 bp, Homo sapiens
  source 1..2207: mol_type = other DNA
gttagttcttttttttttttctatgactgttttgctataccatgtcaaccagacagaaggcctcagaacataatatgcctttgaggacatcctacttttccttcatttgagagaagtatattgatcacctattaagtgttagatagtgtgcttggttgtagggactgcttattgtttatattgctagtataggcctggcttcactgtatcttatatcttctttaggctttttatactaattcctaacatgacatgtaggttctaacagagagttactaaagttactggctttattctcttcactagggatttagtagtcatagcatggctgcttatgaatttgtataaaataagctgacaaatatgacgtacataaaaataaaacatacataaacaaaaaacatttaatattccagaaaccacttgttaatatacaaaactaatataaaataatatacataaaactagtatctaataactaatataaaataatatgtataaaaactgttatctagtaactataatgttaaactccataaatggtacatatttgtttttgtataattcactcattcattcatgagacgtttatgaaataactattcagccttaggcagtatgctaaatagtaggattacagaaaggagtaaaacaaggtccttttggctgggcatggcagttcatgcctgtaatcccagcacttcgggaggccgaggtgagaggactacttgagacccagagtccaagaccagcttgggaaacaaagagaccccaaccctgtctctacagaaaaatttaaaaattagccaggcatggtagcacatgcctgtaattctagctacttgggaggctgaggtgggaggatcccttgagcccaggagttcaaggctgcagtgagccatgatcatgccactgtgctccagcctgggtgacagagcaaaatcctgtctctaaaaataaaaataattttttaaaaagagacaaggtctttttctcaatggatttgtcacttactagaaacaacagaagtgtgaacaggtaattactctacagtctgatgcatggtatacaagaggatggctcagagagttaacaggtttgtaaagaatgtttccttcagtggtgattgcatacactaaaattttccttagtaaccacctgattaacttaattcatttaaaggagttttccttctaatttgagattggcatattcctatgcaaagtgtcctcttgagaggctaaagtgcgaggatcccttgaatctgagagttggagtccagcctgggcaacatagcaaaactcactcactctctctctctctctttatatatatatatatgtatgtgtgtgtgtgtgtgtgtgtatacatacatgcgcacacacagacacatgcacgcacacatgcacatggatatatatatggaaaactatatctttgtatcctccatgagtttcctcacttctcttcacggtattcctcgggctgctcctccatctctcacattgtgaggttgccttctgaactgccatgtcctttgcagagccaggcatgtttttatcgtaacgtatgtaacaaaatgtaaaaaataaatacataagaccatactcatttatccaaatacagtaaagtgaaaaattgaccacagcaatataatttgtggttctcagaagtttctccagctaaaaactggaattgctgtgtccagataaaccttcacagaaatggggtaatgagaaactaaacccagtgataggaatttctagataacattgaccacaggtcacatctgatgtgttttccctagctttcttaggagtctgactgtcttcattgaagaataatcatgtacatgactttagtttcactagtgcttttttccctgaataacattcttcagtcagcgttctctgagataaacttgagctttggtgatgaattgaggaactcatggcccagttctgggggtgttaaaagaaaaaggggctaggaccataaaatcaataaccccgaagagcaaagtgtgcttccataatacagcctgctttcctccctcacgtttttcctcctcctttacctctttccgccttatttatctgtattgagtactgcaaaggaggaagcaccatgctaaaacacaggtggtatttatgagtatgcttgcttccaaaagcaagtagatcactaacttttccttttccttacag

SEQ ID NO: 18 - DNA, 3969 bp, Homo sapiens
  source 1..3969: mol_type = other DNA
gtactgaggatcacgttgttggaagggaccttagggattcagctatgcctactttaagactctactcttggccaggcacagtggctcatgcctgtaatcccaacactttgggaggccaaggtgggaggattgcttgaggctaggagttcgagaccagcctgggcaacatagtgaggccctgtctctacaaaaaatttaaaaattaggtcaagtgtggtggctcatgcctgtagtcccagcactttgggaggccgaggcaggtggattgcttgagtctaggacttcaagaccagactgggcaacatggcaaaactctgttgctacaaaaaatacaaaaattagccaggtgtagtggtacatgcctatagtcccaggtacttgagaggctgaggtgggaggatcacttgagcctcagaggtggaggctgcagtgagccaagattgcaacactgcactccagcctgggtgacagagtgagaccctgtctcaaaaaaaaaaaaatgaaaaattagccaggtgtggtgtgcacacctgtagtcctagctgtgctgaagcaggaggatcacttgagtccaggagtttaaggttacagtgagctattatcacactgctgcattctagcctaggtgacagagctagaccctatctctaaaaaaattaatttaaaaaaagactctactcttccatatttctcacatgggcttcttagtatacagatttaaaatgtgggtctgaagccagaatgtctggcatcatcatttactaggtaggttacttaatttttctgtgccccagttttcttacctatattataggtcctataaactgggaatattagtagtacctgctttgtatggtcactgtaaggattaaattggttgaatacatgcaaagcatttagaagactgctcagcacatagcaaaggcttaatcagagttagctgctaccattgtcattatcatcatcatctagtttgtgcactacatttacttaattgaatattgaccaccacccagacatggtggctcacacctgtaatcccagcattttggaaggctgaggtgggcagatcacttgaggtcgggagttcaagatcagcctggccaatatggtgaaaccctgtctctactaaaaatacaaaaatttaacaggcatctgtagtctcagctacttgggaggccaaggtatgagaatagcttgaaccctggaactgagatcacgccactatactccagccagggcgacagagcaagattctaactcaaaaaacataaataaataaaattgagcaccaaaatatttattagataatctgtctgccaataatctatggccactcccttcagtctggctgagaggcagcacagtttagtagaagtagcaaaacctttgcagtcagtcagatttgagtttgaatgcttgagtgacataacctctttgagattctgtttcttcctctgtaatatgggactggaaatccttttacaggattgttttatgcattaaagactatatgtgcaaatcatcttccccagatatcagtggtaacaattataaaaatgttataattgtgtctatagcatgtaataactatagattccatagtgtttcatcagatacaaaaggatttggatctctttctccccaggctactttctaaagcaaagtcaacctcttacaattactaatcatttaaatagatcaaaggagagtatagtatccccctcattcagtaatacacacaagtttgtaatccactgactttgagtgctgaaaagtaggttgagtaactgtgtcatctagttggtgggcagaagtgtcttttagcacctaagtgattatcctggtgtattagtcctttctcacagtgctgtaaagaactgactgagactgggtaatttataaaggaaagaagtttaattgacttacagttctgcagggctggggagacctcaggaaacttacaatcatggcagaaggggaaacaaacacatccttcttcacgtggcggcaggaaggggaagtgccaagccaacaggggaaagccccttatgaaaccatcagctcttgtgagaactcactcactatcatgagactggctaccccatgaatcaattacttcccactgggtccctcccacgacacgtggggattatgagaactacaattcaagataagctttgggtggagacacagccaaatcacatcacctgctgctttatggacttactttcactaatattatgacctaaaagtaaaaccctgccaaatatagatgagtcttatttttaaataaaaagtatcaggatatagttttaaccgaagaactctttcaggagtaatcctttaatattggagtctcctataactgtcctcagattttctttccagcgtcaaataacaattcttgctacctcattctgctgtctcactgccaggatataattaatttcttttgtactgagagatctggtcattgctaccagcaccctggtgtgggtaacagagagtaatctttgtgaaagtagtgacctagttaatacttacttcctgtcatcttaagatgttctcttcataaaggtaaaagggattaacttgttttatttgtctaactgacttttaaaaagggtattcagaataggttttaaaaagaccaggtactgtctgggtgcagtggctgtaatcccagcactttgggaggctgaggcaggtggatcacttgaggccaggagttcaagaccagcttggtcaacatggtgaaaccccatctctagtaaaaatacaaaaattaggctgtgcacagtgactcacacctatagtcccagcactttgggaggccaaggagggcagatcacctgaggtcaggagtttgagaccagcttggccaacgtgggaaaaccccatctctactaaaaatacaaaaattagctgggtgtggtggcaggcacttgtagtcccagctactctagaggctgaggcaggagaatcatttgaacccaggaggtggacattatagttagccagtatcttgccaccgcaccccagcctgggcaacagagcaagactccgtctcaaaacaagagaacaaaattaaccagcgtggtgttgtatatatgtaataccagctactcaggaggcagaggcaggagaattgcttgaacctgggaggcagaggttgcagtgagctgagatcatgccactgcactccagcctggatgacagagcaagactctgtctcaaaaaaaaaaaaataaaaagaccaggtactattagtcttctgagcaaaagaaaagggggaaaggacacgtactcccaaaatgaagtctgatagcttttggagaatgaagtctaatagcttttggaaagaccacacagatacgacactgtacaagaatagtctaattgatagtataatttatgcattttcccaggctaactaaaagcattctgtttcaaaaaggcctgtctagtttataaaagaagcttatttaattgtgattactgattctttcctcctcaaataaaaggaaaaaccttatcgtcagaaattcagttttttattccgattttaatgaaaaggctgcctagtgagtcaaactgtatcttttatttcaaatgtgggtttcagcattgtttagtgtttagtaatcccatctttgaaaaagaaaagtagaacctcattaaaataaattggacattcagctgtcggtgtgacatgcattcttcattcttacctcgagatttttcaataaaagaaacttcggagctcacacagaatgttagtggggttattgtttgtttagctttagtttttccattttagcaaaataacctactttctaaaaggtaaattaatgtttaaaggcatctctggtaacagatatggcttaatgactggaagaggccatgccagtgtagttgctagaggagaattttcctatgttgccaacgcgtgtttctggctcctag

SEQ ID NO: 19 - DNA, 16859 bp, Homo sapiens
  source 1..16859: mol_type = other DNA
gtgagttttttttttcccccagtaaacctgccaattagtttttttagaaaacttcttgactgctgtcaggtttctgctcctaacaggttttttcagaagctgaatgtgttcaagaattttataggccttctgcaaaaccaaaattttccttatcctgtcctctttcacaacatatttttacttggaggttcatctaccagtgaaagatgtttgttgaataacagcctatggaaaaagaataagactatctgtaaggaaaggttacaaatactttgctttttccttttaatcctttaggaatttgatataaatttctcagaaaaactgtgctgtaatctgtctcttctgcttatcaatgctttgtttactttagtggtttttcaatcctcttagaccctttactcatttttaaataataattttgtaacatttgcctttactaacttcaaattaaaatcatagataatatagtctaaccatgcaaagaatttgccagagtggaggtgtatgtgtgcagtagattaaaactgatttttttatttctgaaaataaaaagtacatttattctcaactttgtaatacagtccatttaattaggcccagactattctagcatgaaccatatgaacttgctaacatttaaccattattaacatatgaaaatgtctagttcagcaattcaccgtaatagttgaaatatactgttatttggctgggcatggtggctcatgcctgtaatcccagcactttgggaggccaaggtggaaggatcgcttgagtctaggagtttgagaacagcctgggcaacgtggtaaaacaaacaaaaattatccaggcatggtggtatgtgcctgtggtcccagctactcgggaggctgaggtgggaggatcacttgagttcaggaggttgaggttgtagtgagccatgattgtgccactgcaccacagcctgggtgacagagcagaccttgacttaaaaaaaaaaaaaagaaaaccacccaaaaaactgatagtaacagaaatgaaggtacagttttccaaatttgaaatctctgtatgtctctaaaggtagacttaaaaaacaacaacaacaaaaacaaaaacatttttattaggatacttttagattcatagaaaacttgcaaagatgatataaggattgcctgtatacccctcagcctctcacccctacttgtaacatcttccattccaatagcacatttgtcatagctaagaagccagcattgatacagtactccagactgaacaccacagtttatttggattttactagttttccttaatggtctttatacagagaatcttcttaaatccatacggtgtcctcactgaatataaatagaagaaatttttgtatttttcaagtgataatgcttggatatgactatgcagtaagacataatgaagtatgctggaggtttgcactgtatggaagtaaccctgaatggagcagcagcaagtgcaaactgatggaagtggtttatgttgtcagctcaggtcctagaacagtgctgacaatggtggcatgaggttccaaaatgatgaacacctcctgggaaacttcaaaagaaagtaatctcacttcaacttacacagtagatcctagtacttgtagtcttagaaattaaaatggtgtaaaaaatgcttcgcaaggctaggcatggcagctcacacccacaaccccagcactttgggaggccaagggcggcagatcgcctgagctcaggagttcaagaccagcaacattgtgaaacccagtctctacaaaagatacaaaaattagccaggtatgatgacacacacctgtagtcccagctactcagaaggctgaggcaggaggattgcctgagcccaggaggtcgaggctgcggtgagctgtgatcgcgccactgctctccagcctgggtgaaaaagtgagacccggtctcaaaagaaaaaaaaaatgctttgcaaaaatatgtacagtggggttagtttctcggtttagttacagctagtttttttgatttatgtgaatagtccagcagggggtatgaatgacgagcaggatatggaacagtctttttgttgtcctgacatgtgcagaatcagtcctgtgcatccagcatccctatatcccagagtagccctaatcattgtaataacccaaaatgtacccattcatttccaaaataattctgtcacctttgtttaaaaactggttctttcaacattttatctttaacctggtgcttccatcttttgttttaaaaaacagaggggaatagtatatgagtatgtccagagaaatgtcctgatatggccatttttaatctctctttaatccaaggaaaataaatctttcagaataatctttctttcttaggtgtttttaaaattcattttcatagcactgactgggcgtggtggttcatgcctgtaatcccagcactttgggaggccgaggcaggaggattgctttgaccctaggggttcaagaccaggctgggcaacatggtgaaaacccatctctaccaaaaataaaaaaaattagctgggtgcggtagtgtggctaggctttgcaaggctaggcatggcagctcacacccataaccccagcactttgggaggctgaagggggaggatggtttgagcctggaaggtggaagttgcagtgagctgagagtgtgccattgcactccagcctgggcaatagggccagagcctgtctcaaaaaataaataagataggccaggcatggtggctcacacctgtaatccaagcactttgcgaggcccaggcaagtgggtcacctgagggcaggagttcgagactagcctggccaacatggcaaaaccccatctcaactaaaaatacaaaaattagccgggcatagtggcacatgcctgtaatcccagctactcaggaggctgaggcaggagaatcgcttgaacccaggaggcagaaactgcagtgaaccaagatcgtgccactgcactccagccagggtgacagagtgagactctgtctcaaaataaataaataaataaagtctattatcatagcactaggattcctgaaatatttatcgtgtggaccttctatcaatgtccacactgtggttgacatttcctttaattaggataactccagtttacatttaaaaaaattttttgtaatttagaagtcaaaaatatttttcttaattttagacttatggtatattacttatattatccaaaatccagttatatgtttgtacatagattaataatgacctgcttttaaaatagtggatgctcacatttttggatctgaggaccctatgaaaatctgatttatgctgtgggtacctcttgtagaaaaatacacctacaaatatgcatgaaattccaaaaggctcacagacccctcgaagccctcaccataatgaatctcaagttaagaactcctgagttatagcagtttccttcttatttgatgatttcacaaggaagcattttggtcttttaatcacatttattaagataatagtgatcttcaaatagggttttcagtgctcttgatgcatgttcgtttttcaggcacagtcctcttatcaacttattatcatatgcttaccatgtattccatcagttctccacaactcattccattgttcccattatttcttacattaattgtgatcttttgagatagtcactttagtactagaaagatcttttcttggtactctgacattttagagctgtctgactcgtgactgaactattaatatatatattgcattcaccagcttagtgtttctctcttgaaacagtagacatattcagttcttaaagttttgcctaacctcatccatgagcacaaatgtgtcatactgatgaataatgtgttggtacaattctttacttggtcatatcttcatgagattatctttgaaaaatctcttcttgtctattaatcctttcagatagcctgtaatattttaagaacttttaaggtcatcacaagtgatcactacttttgtttttcataggcaccgatccatatatttgcaaatttataatttcaaagccttttgtactgacctaaaatggatgatagtgaaaacagagattgacaacttctatgttcactaatacttccagcttacctaagaaacatatagtgaattaaaaatttgccatatgtattcagtacattggttttaagaaatggcagctcagtgtttgagctctccactgtggcagttggcaggtttcatgactagaagggctcgtttgagcttgtcatcgtaatatttaaacatgttggcaagaacatcccgttttcaaacatgtagatgcactagttcaatatgtctgctatctcttcattcaggacgtgagtttcactcgtattacgtttacagggtaggtaggtaattttgaagatagcaatcaagaggtgatatctgtagtatctgttcctgttgcatggctttattgtggtttgagctgtcagtaatcactagcctttgaacttctgtagaatagtaatgcctcttagcctccattgtgatgtctgtgttgtgttgtacattaagagcggtgatgaattttgaactgtaaagatgtcgttattctaaggaaacacataagaattacactaaagccttcttaattaaacgtgaaagggatgggcagaagaacttcaaattgtgtgacatgaaatcattaatttggttaaaaactaataaataaagcagcttgtctgctctaaatatttggattagattctgctgtagataaatgtaccctgtattagtcaggaaggcaccctggtgttatgacaagagcactggatcaaacatcatttgtgtatctgtggacctggctgtatgacttggggacagttatttaaactctttgaaccatctcatttttcttattcagaaaatggggacaacagcaattctatgtacttccctggacgattgggagaattaaaccaagcatatgtgaaaaggcatttggaaaagcataaggagccatatgtacgtgaagtattcttgaaactatgcttatgtataattcaactcttttgagatcaatatacaactcaaaactagaaagggggtaaaaaagaccatctgccctgagacaatttactgccacttgaggttcaacagaattcacaaatgcttaccttcagtgggttttgagtgaagatctgtggaaggtgattggaaaccctcacgtttgtatttggttctgttttgttttcatgattgctgcctacttagaatttgatacctgaaacagtaacagaaagagcagcttggagtattgggagtgatggaggattagctgaagagcaatgtgggtatgtttatctccagtattaacccccaggaagcgaaagacaagcgaaagacaaggttagaccagccaagaccatacctagtcaggcagaatatgcaggctcagaagaagataggcagctgagacttactgaacatgtaccaggtgccaggaaatatacacactgctttacattcattcatttttatcttcacagtacgctctgaagtagatgggtactgttattgtccccattttccaaatgaaaaatctgagacatagaaggacctgcccagggtccaatagtcatgacctaactgctctactttattgcgtatttgcgctcccattccatgcactggagacaatactattattcatggtctgaatttggtcttccaaatgtgttggatgggcttccttctcctaagtttattaaatgacactctaataatgtagaatgaatgcaaatgtggaatgaatgcatttatttatttctaggtttccctctgtgtgagttgactgttgaggtttcagtcctaaaatgcagtgaactccctatcatcagctttgtggcctctgctgtcaccctgtctccctagccccaactcctgcacactgttttagtttgtgactttaacatcagatgtaatttctttcaagatcttctttttgttattttatttgtttgcttatacatatataaacaatacatacatgtgtaaataaaataaatgaagtcataaaccaaaatatgaatgtattaatgcataatgtttatttgggaatgtgcttatttctttcatttgcttagtgcattttctacatgtattattttttaaaaatcaaaatattttttaaagagagggatgtttagttttttgtttgtttgtttttggagacagggtctcactctgtcactcaggctggagtgcagtggcacaatcatggctcactgtagcctccacctctccaggctcagttgatcctcccacctcagcttcctaagtagctgggaccacaggcatgtaccactacaccagggtaatttttgtattttttgtagagatagggtttcaccatgttgcccaggctgatcttgaattcctgggctcaagcaatctgcccaagtcagcctcccaaaatgctgggattacaggtgtgagccaccatgcccagcctatatagttattttaagaaacagaattattgactatgtgtctgacatgtcatattacctatggtaggatggggttcaaaagaaagaaaagttatagtatcttgaatgttcagaatttagcttgaggacatgaagtgcaacaaataaaaaattaaaagcataatattaagtaaaataataaaagtagaattttaagtattgaaaaaaagtagagaggtgagaggttgaggtcaagaatgataacaagggaaaatatctttgagttgtttaagtttgaatcttcatacagaaatattctccccagggcttcatccatttcacagatatttattggacatcctctactttctgtgctggattttggaaatacagtggtgaataaagcatactctctagcatttgagtttgaatagtacctttatttgttttcatcttaaaaagaagcagtttaaataagatgtacctgatcaggaaggtacagctagtttgggagcaagcctgtgaacttaatatgcagtattcaaaacttctccaaattatgttatttcctgggtcctttaaaggatgatggtgatactgaactgttgaactatagggcagttgtgaagataaagaaggatgtcaacacattatctttattactattatttccagtgatcactcggtatgtgtgaagttaaaactatggccttttaatcatctgtttatggcaaagtctagtagatagtggtcactttaaaaaaaaaataccttgccttgttatataaacttctccatcatccctggatttagggatagattagacaggccaggatgtggaatgactgctaagaaatcagtactggatcacctcagacagccaatgtcaggtctcctgaggcctgtcctttttcatgagcacaatacacttattgatttcagcaactgccttttctttgagttgggatttgctatcatggaaataacacttagttgtagccattaaaagcaactgttctcttaattagaacagtcacatgtaagatttaggcctttaaatacagcagaagctcataggacttccgaagcttcaatttatatgattctgttcctgttcttattgcactgtaggaattgcaaagttaatctctatagcatcaagttatctgttgtaaaaatctgaaacagagtacattttagacatcctattgtttgtttaaaagatagtaaagacagccaggcatggtggctcatgcctataatcccagcactttgggaggcagaggcgggcagatcacgaggtcaggagatcgagaccatcctggctaacacggtgaaaccccatctctactaaaaatacaaaaaattagctggacatggtggcgggcgcctgtagccccagctactcgggaggcaggagaatggcgtgaacccaggaggcggagcttgcagtgagctgagattctgccactgcactctagcttggatagtgaagaaaactctcttatttatttatttatttatttatttatttatttattttgaggcagggtctcactctgttgcccaggctggagtgcagtggcatgatcatggctcactgcagcctcagcctccaccttccaggctcaagcgatcctcccatctcagactcctgagtagctgagactacaggaatgcaccaccatgcccagctaatttttttatagtttttgtagagatggggtttcacaatgttgcccaggctgatcttgaactcctgagctcaatcaattctcctgcttctacgtctcaaagtgctggaattacaggcatgagccactgtgcctggccaaaatcgtgtatttagacaactgtcttcctctcaagaacttctaaccaaacaggaatctaagtttacattgttttctaggcttttgttatctaaatatttcctgcagcaaaaaaaatgccctaaaactctttgaagtgtcagctacaaaaaatatttgttaattggattattttgtgtgttttttactgctttatctgggaaatacattagcatcaatagttatcatggcccataagcaactattaccaacaccttcaaattgtttgcattgataactatatgaagtacttttttagggttctttggattatagtttaaaaactggggaatggtatttgttggctggtcaacagtgagtaatggttcagcacccatgctgttttgtataagatccattaggctgctagattgtgagtcttacccatggtttctgtgtggacatacacagtggctgactgcattcctttctcttgagaattcggttgtttgctgcaaattgagctttcaaattttgtaggttctttgtcctccttttttgaaaaatatttaaatgatgttgcccaaagggctcacagagaaacagcatgaccaactttcgggaaattagtaagcactagggttatttttagctttttctccttacaaacatttccttttgttctttagaagacattgttgatctttcattcatttgctgtgctgtctccccagctacaaaatggcttttgaatagaataagcgctctcttctctactctgcatgacattaactgtgttcttattttattcagtttttactctagctcatgaattatcatttgtgtattttttttctggatattgaatcctcccctacacacacaaacacacatacacacatttttgttgtcatttggggttgacttcctccctcatatgcaactaatgactgaaaaatcttcatacaagcaggatatacaaagtctgtatttttgtcagtatatcatatggtggtggctgatggtgtgatttggcctttatttgctgttagtacctatttaaaaaccatcaccttgagaaaattgtgcagtagtgtcacgggatccttggggtgtcgcatcaccagccagaaacctctgtgaccagtggtacctttgcccaggttttgcttgggcccactgggcccactcagcctggcaggctgcactcagctcgcactactggcctggatcccatgcctgccaagggcaagtggagtggcaaggggtgcatgagtgagcaagcatggggtccagccactgcacacagccaggcatgctggctatggcggtgcaagcagctccaggtgccagcacaggcgctggaggcaaggctgcctgcaaggctgcagccggaccaggcgtaccacaagcagctttcacagctggcactggggaacacagtggcacccagaagcttagagacgctgggaaccacatagccccaaagaaggtatcacagccctagctcagggagctcctaggtctgggttccctgaagggccacaactcttctctccttgttgcccacagcatggcgagcaaggggcatgtttcagccctgtttgtgttatagccctttaggccccaccattcggcaggtcccgagttcctgtcccgtgcccaggaagaaggaggtatacgaacaagtggagggtgagcaaggcaaagaggagctttactgagcaatagaacagcttagaggagacgcacaatgggtagctcctctccacaaccagggtgtaccaatgtgagtgttcagctatcagcagagagtagaccctggagtggatagctcctctccacaggtaggtcatcctgtagagggttcagctctcagcagagaagagaccctggggtgggtagttcctctccgcagctggtttgtcccaccatcttttcaactttcagtatagaggagaccctgggatatgtagctcctctttacagctgatcgtcccgatgtctgctcagctgtcagcagagaggagaccctggagtgggtagctcctctctgcagctggttgtcctgacatcagctcaagtctggctgagtccagtgtttttatgggcttcagaggggagaacgtgcaggctgattggcttatgggtgggcctggcaaaagcaccataagttcccactctggtctgcaggactggcagcctggcccccaggcttcaggccttccctggcttgaaggtggggcttcaccagggacccacccctttctgcccaggaacctgtctgcctgctaccactgtttatggtgcccaggctgttcatgcagaggggcacctgcaggccagtgccaagccacgctcagttcccccctcagcttccctcccatgctcgtcagtgcccaaagttcagtaggggctgaggcagcaaggggctggcatgtcagtgctgtcctgagcatatggacacctggccaggttgtgacagtgcctgggattgacctcagctttgctccaagatcagagcaggtgccgctaatgggttgggggagcttccggggcccctgagagtacagagatgcctgggtccgcagccatggctgggtagctgtagctacacccaggagggtggggctcctgccttcttccagcccctaagagtacagggatgcccaggtctgcatctatggcttaggaaaccgcagctgtgcccaggagggtagggctcctgcctgctcctggcccccaagagcacaggcatacctgggtcagcagccacagcttgggcagctgcagctatgcccaggagggtgaggctcttgccctgccaacttagaagggggaaggacttttctgcctgttcctggctcctgccagctccatggagcgcacagccccagccacgcttcccccactgcagccgagatgggccaccactgccatcagtagtattgcagaatcgcaagttcaggatagatggttacaaaggctggtctttacacttcagcttcatgtttgatctttgaaaaatcttccagtataaagaagaagtcaaatttctaaggaagcacactgaaaactcactttaactcttcacataaaggagggtttgatataagacttttgtattttagatcccatccaagaggatttagtcattttgtaatatcatttaaccttttttttccattttactctaagatacggagacagttagcatttgtggttaagattgtgggttatgaagtcagactgcctggtttcaaattgaagttacatcattaatctctgtatgctttagtttccttatctcaaaaagggagataatagttacttcatacaattattttgggatttaaatcagataatccatgtaaagagcccatgatatgagcacacctcattttattgtccttcacttattgtacttcacagatattttgttttttacaaattgaaggtttatgtcaaccatgctttaaacaagtgtgttagtgctgtttttccaacagcatgtgcttacttcttgtctctgttcacgttttgggattctcacaatatttcacttttttctttgtttttgatggagtcacaccctgttgctcaggttggagtccagtggtgcagtctcagctcactgcaacctccacctcctgggttcaagcaatctcctgtctcagcctcctaagtagctgggattacaggcacataccaccacacccagctaatttttttttgtatttttagtagacatgggttcaccgtgtgggccaagctgatcttgatctcctggcctcaaatgatctgcctacctcggccttctgaagttctgggattacagatgtgagctaccacacccggacaattttttcattgttattgtgtctgttatggtgatctgtgatcagtgatttccttttttatgaaatagagacagggtcttgccatgttgcccaggcaagtctgtcagtgcaatttttccaacagaatgtgctcccttcatgtctctatgtcacatttttgtaattctcacagtatttcagacttttccattatttttatatctgttattgtgaccagcaatctttgatattactattgcaattgttttgaggcaacacaaatcatgctctttataagagagtgaacttaattgatgaatgttatatgtatactgactgctccaccggccatttcccatttctcaccccctcttttggcctcctatctgagactcaacaatgttgaaattagattagtcaataaccctacaatgatctgtaagtgttcaagtgaaaggaagagtcataagtcttttgctttaaatcaaaagctagaaatgatcaaacttcacgagggaggcatgtcaaaagatgagataggcctcttgtgccagtcagtcaagttatgaaacaaaggaaaaagttcctgaaagttattacaagtgctactccaatgaacacacaaataataagaaagcaaaatagacttgttgctgagtggagaaagttttagtggtctgggtagaagatgaaaccagctacaacattcccttaagacaaagtctaatccagagcaagaccctaactcccattctatgaagctgagagaagtgaggaagctgcagaagaaaagttggaaggtagcagaggttggttcatgagttttaaagaaagaagctgtttccataacataaaagtgcaaggtgaagcagcaattgctgatttagaagctgtggcaagttatccagaagatctagttaagatcattgatgaatgtggctacactaaatgacagatcttccatgtagatgaaatagccttctattggtagaagatgccgtctaggactttcaggaatgctagagagatgtcaatgcctggcttgaaagcttcaagggacaggctgactctcctcttaggagttaatgcagctggtgacttgaagttgaagccaatgcttatttaccattctgaaaattctagagcccttaagaattatgctgaatccactctgcctgtgccctataaatgaaacaacaaagcctggatgacaacacatctgtttacagcatggtttactgactattttaagccactgttgagatctactactcaaaaaaaaaagattcctttcaaaatattaccactccttgacaaagcacctggtcagacaagagcttggatggagatgttccagaagattatgttgttttcatgcctgctaacacaacagccattctgctgtccatggatcgaggagtaatttcaactttcaagtcttattattatgagaaatacatttcataagactacagctgccatatatagtaatttctctgagggatcttggcaaagtacattgacaaccttctggaaaggattcaccattccaaatgccattaagaacatgcatgattcatgggaagagatcaaaatatcaacattaacagaaatttgtaagaaattgatttcaaccctcatagatgactttgaggaaggggttcaagacctcagtggaggaaggagctgcagatatggtagaaacagcaggacaactaaaattagaagtggagcctgaagatgtgactgaattgctgcaatctcatgataaaacttaaagagatgaggagttgcttcttaaggatgagcaacagaagtgacttctttatatgcaatctactcctggtgaagatgctatgaatatcgttgaaatgactgaccacgaaggattttagaatattacataaacttagttggtagagcagtggcaggtattgagataattgactccaattttgaaagacattctgttgtgggtgaaatgctatctaacagcatcgcatgctaccaagaaatctttcatgaaaggaagattcagtccattgatatggcaaactgcatctttgtcttattttaagaaatagcggctggctgcgttggctcccacctgtaatcccagcactctgggaggccgaggtgggtggatcacctgcggtcaggagtttgagaccagcctggccaacatggtgaaaccccatctctactaaaaatacaaaaagtagccgggcatgatggtgcccacctgtagtcccagctactagggaaggtaaggcgggaggatcgcttgaacccgggaggcagaggttacagtgagctgagatcataccactgcactccaacctgggcaacagagcaagaccctgtctcaaaaaaaaaaaaagaaagaaagaaaagaaaaaaaggaagaaggaaattgccacagccatgccaaccttccataattacaccctgatcagttagcaccctgattataactaccaccatgatcagtcagcagccatcaacattgatggaggcaagaccctccaccagcaaaaaagattatagcttgccaaaggctcagatgatcattagcattttttaacatataaggtgtatacattgtctttgtgggtgtttttggttttgattttttttttttctttttttgagacagagtctcactctgttgcccaggctggaatgcactggtgctatcttggctcactgcaacctccacctcccaagttcaagcaattctcctgcctcagcctcctgagtagctgggattacaggtgcccgccaccatgcctggctaatttttgtatttttagtagagacagagtttcatcatgttggccaggctggctcgaactcctgacctcaggtgatccacccacctccgcctcccagagtgctgggattacaggcgtgagtcaccgcaccagccatgtacattgttttttagacaattcttttgaacagttaatagactagagtataatgtaaatttatagactttcatctgcactgggaaatcaaaaagtttgtgtggcttactttattgtgatattcacttcattgcagtggtctggaactaaacccacaatatctgtaaggtatgcctgtaatgcctaacataggaaagtctcaacagatgttagctattattattgtataagattgttttatttatgatataagatgtaatcttacactatcatataccataatgagataaaatattcaatttctggggacccttacctctttccctgcaagattttttttattgggatgtcctcaatagaggtggcttaattccacaactagtgaatttagttatccttgcccctttaatatttgcatctcttcatatctagaatcggcacaattataatgagaaatcaagcaaaacatttttttgcataaagagaggaaggcagaatgtgagatggcgttgacatctgtgcctctgccctgggccaaaaagcagagtgggtatttgctgctgattcggcaccccatctgctgccttctctggtggttacatccctcttccctttcccctccgtgtggagccccagggatgatgaagtcagggagagaaggatggaatgtaatgcatcagaggagaaaaacaggacagaggttcagtgaaagacaacggaatgaggagccccattctgcagatgacccagtaggataaatgctgtcttctctgccaatggcagttttacaagtgtttgaaggactgtgtgaaggttaaaaaaacactagcctgttttagtgaatctctgtttttctacttgagagcttttctgacgtctgactcaagaatttactaaacttggtttcattaaactctttttaaacctcttttgtttttttaactcttagctcaggccttcagaataggtcgtttgtttttaccaggagtgctccaacttttgaatacatccgttgtttctcttttcctatagcatataactcactccacttgccaattaatttacaaacctaactcctactaaagcagcttcttattttaaggtaacattgtctacccaatctgagaggtagaaatctgactttctacaacatggtaatcttagaaccactcatttaaagtttaaaatgcaaagcatcgcacactcaaagtctataatgttgtgatttaactctttaattaattttggttaagacctaagtagttaagacctaagcaatagagtgatgagtgccccagaaaggcatggattgagacctaagcaatagagtgatgagtgccccagaaaggcatggattgagtaaacaaaagtaagcaattggaaggaggagctagggagaaattgcttgtttaatggatctcttcatttttaatggaaaattctttaaaaatacttctgctttcaaagcttaaggcttgtttttagcttagactgattgtatttttcagttctggttttctgatgattgttccaactttgtctacaattcaaaggaatgaaattactactgtaatatagagtatttgggggttgtttttcacactgttcagctgctgtgttttattttcacttgactatgaggttattctaacccctcattcagaggaacagttgagtctgattctgccttaagttttcgtgactcttaataattattcattgcatatgtactttcattgagttctttaaaaaaattctctgtgtttgctttctag

SEQ ID NO: 20 - DNA, 335 bp, Homo sapiens
  source 1..335: mol_type = other DNA
gtatgacttctaattttaaaaaggaaaataaattagaatctcttaatgtagaattgctgtcaccttcttctgtagaacttattttcattttaagtggtatcccaaccgtgctagcatgaggagtgaagaacattaaatatattggaataggaaaccccggaattttgtctgaggcaaaaaaccacatctccttttaaatcttaagtagaatgagatgtcctgctcccattttgtgagtactactggaatctgtttttggaatctacaatcttgtgataataaaacacacagttctgtcttcttcaaaacatgcccaaacattcttatgttattag

SEQ ID NO: 21 - DNA, 2089 bp, Homo sapiens
  source 1..2089: mol_type = other DNA
gtatgtaactactatgaattgagttcatttctctgtgaagcacagggcgttctcctaacactgcaggggagatggagtttgtcagacagattacctaattgtttctgatttctgtaatcaggccatgactttcagataagcatactatgtccttatgagttatcccgtccaaatgcgcttgaaggaaaggtggctccagatctgcagcattttagtgtaatcaggcatgagcagttggcctccgccccagagctgggagagccattcgtgttggcagcacactctcagctcctccctccctgtatgcatcatgacttccctgtgattttcaggaagaaattggcagaaggggaactttttaagttttttttcctttacatatagtattttgtttattttttccatcccctcaagcatttatcctttgtgttacatacagtccacttgcactcttttagttatttttaaatgtacaattaaattattattgactatagtcatcctgttatgctatcaagaaggagcattttcaggcctggcatggtggctcacacctgtaatcccagcactttgggaggctgaggcaggaagatcacttgagctcgggagttcgagaccagcctaggcaacatggcaaaacccgtctctaccaaaatacaaaaattagccaggtgtggtggtgtatacctacagtcctagctacccagggggctgagttgagaggatcacctgagcctggggaggttaagcctgcagcgagccatgattgcaccactgcactccagcctgggtgacacagtgagaccctgtctcaaaaaaaataaagggtatttggggggagaagcatgaacttcaccttgtttctgattctgagatcagttaaagcatttgactagcagtttgtaatctgagatttatgggactcatgcatgggcgtgtttatatttgtatgtgtatgttttaagccaatatatagttgtgcttttatatgtagttggtaaggtggattttttttcaccaaggaaattgttattaaaatgagtcagccacatttatagagagaataaagataagaatggtccgttgagtcattctaggctccccacatagtaagccatagtgcacctttgtgtcacaagcctttgtgtcgcaattacatttttaaatgtacaattaaattattattgactatagccatcctgttatgctatcaagaagggacatttttaggcctggcatggtggctcacgcctgtaatccagcattttgggaggctgaggcgggaagatcacttgagctcaggatttttgacaaaatcctatataaagtagccctacaggtagattgaattggtgaaaagttctttttcaggcaaggcacggtgactcacgcctgtaatcccaacactttgggagaccgaggcaggcagatagatcacttgaggtcagaagtttgagaccagcctgaccaaagtggtgaaaccctgtatctactaaaaaatatgaaaattagccggcgtggtggcatgcacctgtaatccgagctactcaggaggctgaggcaggagaatcccttgaacctgggatgctgaggttgcattgagccgagatctcaccactgtactccagcttgggcaacagagtgaaactctgtctcaaaaaaaagttctttttcagtaattatcaacctaaaataagtgcaattctgagacattttagatataaagaggtgtggcaaagagtagggttaatattatttttcaaaacacatacatgtttaagagataagaaaggactgatttcagttctaaaacactgagctatctggtgggtgtggacaaagccgctgaaactatccttaggcattccagagcttggggccgaaaccagctctgaggttgagccattgatagatgtttataaacatcttggccaagaggacacatcagcccaaggagtactagaggtgagatcatgtcattcattctctcctcccacagctggcctcctcagagggaaaccttagctagctgttaacctgatcattaacgtttgctatcacattgattgaaatgtatctttttttaaag

SEQ ID NO: 22 - DNA, 10389 bp, Homo sapiens
  source 1..10389: mol_type = other DNA
gtatagtattatttttctccttttattaattttgtagttgctccctcccctttaactcctagtgtaaaatattggtcacatctagattttactgtaagaggcttggtaacagcttttacctctgaggccctgcatctttcaaatcatcatacatcattaagttgcagtatacaagtgattaattctatagtttaaaaaaaactagtatattttcttgcttattaacattctgatatattacataattaaaaattcaaagctttgtttatggatttgagaatctgtagctgctagttttgacatgtaccatacaacattttagttttataggaggttgggaaagaaaggtaaactccttcctgatgtaaatggtttccctgtgttttgatattctctacacactttgtgcactttctgtgggagacgccctttttctgtggctggcatgccccacccactacatagtttgtgacctttgtcacaaagttgcttcgttaacctgagccattactttctgtatgcagtgaattgactgccaggtagctgccagacaaaccttcctgatttacagcccccaatctccattctcattgaagtctcatccatcagattatttccaaggctgatgcattttccaatgtatgtttttaaattcttcgattcagaaattagaagaacaaattatcaaaatcaggctctctgtactgatttcaaccaatagatttttttctccaaatgttttttctagattgcatagtaccttatacatatgtattgaaatacattgatgtgatttagatcaccattccctccccatcttcctcctgaaataacacctccaaggtacccatacttcattattttgaagcatttcatctcccatcccaccccacccaatctgttaagtccttgtaattctttttccattacctggccaacccatttacaaaggtcaactgctgactattgttctcacagacatacctattcctgcatgaccttcaaccaggacccatcccttaatgcctccaccatagagatagtgcccttaggattcaaagtgttctggggaagattgtatgactccactgacatgcccaactgcaaagtcatgcatgtagcctgaactggaccccagtgttctctgtggtccaactccattccccttattgatttccctccaagttcccaccacctctctcatctgtcagcagatgatctctcctctttattaagaaaattaagatcattgaagctggctgcagtggctcacacctgtaatcccagaactttgggaggctgaggtgggaggatcgctcaagtccaggaatttgaaaccaacctatttgatatagcaagacctcatctctacaaaaaataaacagaattagccaggtgtggtggtagaagcctatagccccagctactctggaagctgagatgggagagttgcttgagcctaggagaggtggaagctgcagtgagccgagatcatgctactacactccagcctgaatgacagagtgagattatctcaaaaaaaaaaaaatcattgagaatgagtaccttcatctttctttctgtgtacttcaatacttgtcttattttctcctgtctcagaggagatgtctctagctccaggagttcctggtaagagttcctggtttgctgtcttggaaaaaaaacttgctactgactctgataaccccaatcagtgctactactctgttcttttcacagcctaatttcttggtataagaagtctttgcaaacctctctttccttgcttttgccccaaccaacagaaatggaaagttacccttcctccgtagttaccactgatgacccagttaccaactccaaaggccctcgtccttcttctttacctcctgctgcttgttattcctctgtctgttcacagccctcagctgggcaatcaaacccttctttacttcccagtactccctgtgtgttagacaagtttatgtgttcccttaggtctctccaccttcacaaatttattcgttctatttcgttcacctaaaatatatgcctccttcatctgtgcatctcaaaaattccagcagtcttaattgaaggtctcactcacataactgcatgttcaagaagtctttgaaattatccaaaaccaaaagtgatctttacatcctttgaacatatgagtggacttggaggagtggaccaagccttccccgtcacctcctcagtgctgccactatgtgaccacatacccagtaccttctctcattaccttttctcttctcttttggagaactgtccccaaaacaaatagaaattaaaaatccaaagataaaaataaaaaatggaaaatagactagtttttaaagaaaaaagacaaaaaaaagtggtcttgagcatggaagaagggcttcaataagcttttactatgtctgcaatatttaatgtaactattaccaagtgaaaaaacatcatattataaaatattttataccatacaatacgaatgttgattttaaagtgtgttttaaaaaaaagtacatcaaaatgtcaatgattatctttggggataagtttatgagtgattattaattttttctgtatttttcctagagcttttccttatttttacatagtacatagattattttagaagccagaaacaatgtttcaaagagaaaaaagtctaactaggtaaaggtacaattatgacgtcttactggcaatcattggtgaggcttcctggcataagtgtacactgcctctcccagccaagcttcgccatcacctcctctgtgcttgcccttatgtgaccatatacccagaaccctctatcattaccttttctcttccagctgtcaaggtagcagccaaattactgatccctgtggttccaaggaacttgcaagtgtaatagaagcaattcctgcattgtcttctctatacttcctcttattctcaggcttcacagtttggcaggcagccatactactcttatttagacaaaggtgctgggttgaacttagagaaagcatcatcccaacaacttggagttaaaacttgtgatgttgaaaacaattttcagtgttactaaaattctggattcagcagtgctgttattattagatgtcttatgccataaggctggtgttaattccttcctttacactttttcctttcctttcaaatgctctgagtatcatggcacttcctgatcctctgctgtcacagcaataatggacctggctccaaaagccaagaagaatcccttggcccctcaccctcacaccctttgcagatactaaaagatgatttttaaacaaacattttgttccctcctacaatatactatttggggttttttgttggtggcggcgggggatgttcttcaaaaaaaaacccacaaatatttgctctaaaataacacttgccttacaaaatacaggtacccagttattaaaaattaatgctttgggacaacaatcctagtctccaaaaaacttagatcattattatagctatgtgtgatgaagagaaaaagaaattcttttgttgtcccaaagcattaatttttggtaactgggtacttgtattttctaatgtgagtgttactttagagcgaacatttattttaaaaagaaaagaggaagaagaactccccccacaaaaacaatgtataccacggaatacagtgcagccaagaaaaagaacaagatctgaacccagaaggcagaggttgcagtgagccaagattgcaccattgcactccagcctgggcaacaagagtgaaactcatctcaaaaaaaaaataaaaagaacaagatcatgtcctttgtagggacatggatggagctggaggccattacctttagcaaactaacacaggaatcaaaaaccaaataccacatgttctcacttaaaagtgggagctaaatgatgcgaacacatggacacgtagaggagaacagcacacactggggccttttggagaaggtgaaagatgggaggaaggagaggatcaggaaaagtaactaatcggtactagctttaatacctggataatgaaataatctgtatggcaaacccatgtgacacaagtttacctatgtaacaaacctgtactcgtaccccgaacgtaaaagttaaaaaaaaaaaaaagaaacagaaaaatacttcttcagaccagtacaccatacattacttattttgtgccacaaccacagagtgttattagccaacactgagaaagatggcattatcttgagttgttccaaactcggtgcatttgctttagtttcacatgtcagtgagtggtggcttcagatacatagacaggataaaaatatgaatttttatgatataaaggaatacttcatttgatctgaagtcatgggaagcagacaaatcaaaatatatcctgcagactttgttgtctcaccctccctaatgtgtgtgtgggtcattttgagaaggtagcgggatggcccttcaaagcgtcagtgccttctattgttagtccccaggcactagagaggctgggagctaagaaaccacatgttgttgatgttattggttatgcaatagagaagactgtgtccaggccttccttctctctgtaacctcctgccatcctacaaaccccagggtctgctctggggaccatttcagatcttggcaagcagaactatagaaagtagcagtagaatattttagggtatagttttcattctgttttgagggcctctatcaaagtataataactgactgcttacctataatagcctaaaactttgctacctctggttttatctgtagttttttaaatattgttcttcatagtaaatagacatcacatcgtaactgtttaattactttgttatatattacctaaagtacttttttctcagtgaacatgaagttgtctcattgtcagacatacttttcacttttctaactgttctgctaaataattatggaatggaactgcttgggattaatgcttttccaggaagctctcaaaggtctttaaggtcaccaaatgtgaattcagaatccagcagctaatcataggttgaaataatgggggcattttaaccaaggccatttctttttataaggcaacttcattgtgggaaaattttctaagaggtaatagacattgtgaattcaaaggcaattatattgttaagctactattatcttcctcctcttttgcatttgaagaaattgctaagctttgtttcttccatcagaggagaagaaatatgaacaagtatcacttctgaaagaaatactgagaaattcaagagagttaagtgtaactatatttcagtctgtaatgccataaggaaggagctacatcttacataaaataatagccacaaaaacatgaagagtcttggttaaacatgacaaagaatcacttgatagagaatctataatataaagctaaggatcccagtgcttgaaacagaatcttaggcccaattcttcctgtaatgtgttgctaaaagagaatatgaaatttcctctccagaaggtttttacaaatggctttaattctcttctctgtctcagctctcctgatgtaccacccaacagctgatttttcttataactgaaccttttctagtagcctcaggtttcgcctgacttgagggacaaaggaaggaattcgaattgatttccaacctacttcttgaatatttacaaggccaggccttctaaatcttgaatcccaaccagctggaagcagttcatcttcctttgggctcttacagcccttctttgtttgctcttagtaccccaataatctgcctggttagttgtctatttctttatcttccctgatagatcataagactcgtgtaaaaggaactattttattcagcgttgggttcccttctctgcttcacaactatttaatttaattaatgttttacatatttgtgcctctttggacctgacggttttctccatccgcttccacttctctacccccccatacatactcctacccagtgtgttttttcctttggatctcctccctccccagaaataaaggtttacccttctatcctcacaaatcagtaaggtttccagaagacctcttctaatcaggcaacaattcctactactattcttgtctccatctctcagtcagcaccagtttttttctctccctcctttgttgttgtcaaagcaattctatttttaatttttgtccattcaagatctccccaccctcacagaaaacaaagggtgtgctcttgggagggagttatggactatggaaggagaggtttcaaagtccagctttagagcaggctggtgagcttgtcaggtgcctgatcgtcatcccccgtccttggctggtcgctctctgccctgatgactgccgctcagtgtaggaaggagacagctctggctgccctccccagagtcatccatgctgggaaggatggaggaggggtggaaagttagtgagagcctgcatgtgctgctgcagagatgcccaagatagcaggagacccaatctgtttcccatttatatattctcattgctgatagatgatggacatccttcatttaggtaattattattgctattaaaatattacctgaaagggtgcatattattgagcaaaatgagtgcctaagtgccttatctctcccacttaatatttctactgaattatgtattctatttcttactaatagagaaaatgaagttccttatgcctttctttagctttattaggagatagaactaattttgaggaagtgctacaccaggaatgcatttgtttccctgaactgtatataagtaactgagctggggcagtgtgaaaggaaagagaggagaggggaggaggaaaggagatgggaggaggagaggtttgttgattaccactctatgccagatattatgctagagagcaaacagaatactgaaatcacctcctccaactgcccagaaactgagtgaggtaggcatattcccatttgacagatgaggaaatcaaggccccaggtcacatagctaaggattgagccaagattcaaacccgggcctgagtctagagttcctgatcttgcttcagaaattgtcactgttagagaagacttgcatagctgccaaaagatacatgctaatcttctaggattaaaaaagccacagaggtggatgacactggttttcctccataggaaagctctagtttttactgtatgcagatcttcctgaaggatgtttctaatatgaaaaattttagcagttgtcttagagcttcttttcttgatttcctcacagttagtttctttataaacaaagtattaatagaacaacttagggcaaagactccctccacctgtggcatatgtctcccagaccacgttctctcacacaaaagagcctggtaccccccgaaacacaaaaattcacttaactatttttttttccctaagaaaagcaagatcctgttaccaaaatgactcttaaactcttctcaaaacttcattgcaaaggaaatgaaactattaaaagaccattgctctgtaattcaggaaattgaatcaacttgtttggagccataggcagaggaagatttgagctgtactgagccacatattgtgagactaaacagtgccctgctctgaaatgattttaccattcatgagctgtctctttataacaccatggagctcctcaaatgcttccttttctttactacctaaaattacagttctctgcacaaaatgaaaatacttttatcagatgttcacatttggagtgattttttaaaactttcatttcaattttccttaatgtttctatacttgtcaaatgcgtatgtctttttaataaataaaagatacatgatacatacatcttgaggctgaagaatttctgcagacgaaatattgatgattgagactggatgataggtttgtgagagctcattatactgttgtctctactattagtatgtattttaagtttttcataataaaatgtttaaaatatttttgtaattctgcagaaaaatttaactcacattgtctgcgttcttcctgtactgctctacccagagagcacagtctttccatgctcctcccactaatttaacactagtcaaattttggcattttgaccaaagaaaggaagggaagggaggtaaattgtggttgggctcaagagccatgatatgctccttcttagcttaattaaaatccatgacaagcacagccatcactcacattttagattctagattgctgctgtagtagtcatgaattgctgcagaacaggcaagaaatgacatgtttttttttgtttgtttgtttgttttcccgaaagctaattgaaggctgggcacagtagctcacacctgtaatcccagcactttgggaggccgaggcaggcagatcacttgaggccaagagttagagaccagcctggccaacatcgcaaaaccccatctttactaaaaacacaaaaaatgagccaggtgtggtggtgtgctcctgtaatctcacttacttggaggctgaggcataagaatcacttgacccctgggaggcagaggttgcagtaagcctaaactgtgccactgcactccaccctgggcgacagaatgagactctgtctcaaaaaaaaaaaaaaaagaaaagagagaaagaaaaggaaaggcagaggcagcggcaggggcaggaatggggggcggaaagggaagggagctaattgaatctagcttcaagccctcgtcgtcaggtttgggaagttcggtatcagtgactgagtgccttctcttaagaaaattgattgaaaacttgtaaataaggcaacaagactgctgtgtacctttttaatatcatactagaacactgtgtagcaaaccttcctaaagactattttatgctctgggccctagacctgtccagtatggtagccacgtgtagctgttgagcgcttgaaatgaggctaagtacaactgaagaactgaattgagatgtaccataagtataaaaaacacgttggattttgagcacttagaacaacagcaacaaaagtctccataatgtgtatattgacacgtgttgaaatgatactattgtagatatagtggtttaaaatagtaaaattaattttacctatttgtttctttaactttaaaaaaatgtggttagtagaaagtttaaagttacatatgtgcttcatattatgtttctgttggacagtgcagccctagagtttctgagaaggtaactttgactagttatttactcctgattagagtccagactgtgaagttacatgttggcctatagatgattaataagctgcaaatgatttctatttatagccaaaaggtaaccccaaaagtttgtgttcttatggccctaggacataaatcattttgtgtctgacttggtagatttcatccatgttttattttccttaaaagtttgactaaatttacctctgatggttgtaccaatcaaaatgttgttatacgacagagctggaaattctctagctcttcttgtactaagtccttttgatcaagtgatataatggatataaatttaagtgttactctgtgaattgtttattatctgtatatttggaattatgcttctgaattgtcttgccttgtttccttaaaaggacagtgaaagggaagtgaaaatattgaacaatgctgatactgaataacaactattttctttcactctatctgcacctgtgtttgtgtaaataaaagtagaggaactgtgacgttttaaaattccagacctccatccccaaagaaaactttccaaaggtcctcattcccagcatcggacccacaaaaatgtcttgccctcccctgcggggcacgtacagcccttcttctctcatccataaggaagagggttctgttgttgttgttttgaatgagcccatcataaaagcagcagaaaccatttgacagtagccatgctactgtttctgagtacccagaaggctatttgtagccttcgtgaacacttgctttctaagccttttgaaatcacgagagatagcatagcaaataggaacctgttgtatattccatttggctatattttgtttgtttgttcatgttgtcagctcactgcttagaatctaaggagacaagaccataataaaggacagtgtagaagacctgaagttttaagctccaaatctcttagctaccaaaataaataaatactacagagctgtttgtgagcaagagaaaacatctagacagagtaaggctaaagtcctttttccttcacccctaccctctcctcttttgcatctagagatttggaaaattgctagaaccatgaattattaggtatgatgttttattttattag

SEQ ID NO: 23 - DNA, 48416 bp, Homo sapiens
  source 1..48416: mol_type = other DNA
gtatagtattatttttctccttttattaattttgtagttgctccctcccctttaactcctagtgtaaaatattggtcacatctagattttactgtaagaggcttggtaacagcttttacctctgaggccctgcatctttcaaatcatcatacatcattaagttgcagtatacaagtgattaattctatagtttaaaaaaaactagtatattttcttgcttattaacattctgatatattacataattaaaaattcaaagctttgtttatggatttgagaatctgtagctgctagttttgacatgtaccatacaacattttagttttataggaggttgggaaagaaaggtaaactccttcctgatgtaaatggtttccctgtgttttgatattctctacacactttgtgcactttctgtgggagacgccctttttctgtggctggcatgccccacccactacatagtttgtgacctttgtcacaaagttgcttcgttaacctgagccattactttctgtatgcagtgaattgactgccaggtagctgccagacaaaccttcctgatttacagcccccaatctccattctcattgaagtctcatccatcagattatttccaaggctgatgcattttccaatgtatgtttttaaattcttcgattcagaaattagaagaacaaattatcaaaatcaggctctctgtactgatttcaaccaatagatttttttctccaaatgttttttctagattgcatagtaccttatacatatgtattgaaatacattgatgtgatttagatcaccattccctccccatcttcctcctgaaataacacctccaaggtacccatacttcattattttgaagcatttcatctcccatcccaccccacccaatctgttaagtccttgtaattctttttccattacctggccaacccatttacaaaggtcaactgctgactattgttctcacagacatacctattcctgcatgaccttcaaccaggacccatcccttaatgcctccaccatagagatagtgcccttaggattcaaagtgttctggggaagattgtatgactccactgacatgcccaactgcaaagtcatgcatgtagcctgaactggaccccagtgttctctgtggtccaactccattccccttattgatttccctccaagttcccaccacctctctcatctgtcagcagatgatctctcctctttattaagaaaattaagatcattgaagctggctgcagtggctcacacctgtaatcccagaactttgggaggctgaggtgggaggatcgctcaagtccaggaatttgaaaccaacctatttgatatagcaagacctcatctctacaaaaaataaacagaattagccaggtgtggtggtagaagcctatagccccagctactctggaagctgagatgggagagttgcttgagcctaggagaggtggaagctgcagtgagccgagatcatgctactacactccagcctgaatgacagagtgagattatctcaaaaaaaaaaaaatcattgagaatgagtaccttcatctttctttctgtgtacttcaatacttgtcttattttctcctgtctcagaggagatgtctctagctccaggagttcctggtaagagttcctggtttgctgtcttggaaaaaaaacttgctactgactctgataaccccaatcagtgctactactctgttcttttcacagcctaatttcttggtataagaagtctttgcaaacctctctttccttgcttttgccccaaccaacagaaatggaaagttacccttcctccgtagttaccactgatgacccagttaccaactccaaaggccctcgtccttcttctttacctcctgctgcttgttattcctctgtctgttcacagccctcagctgggcaatcaaacccttctttacttcccagtactccctgtgtgttagacaagtttatgtgttcccttaggtctctccaccttcacaaatttattcgttctatttcgttcacctaaaatatatgcctccttcatctgtgcatctcaaaaattccagcagtcttaattgaaggtctcactcacataactgcatgttcaagaagtctttgaaattatccaaaaccaaaagtgatctttacatcctttgaacatatgagtggacttggaggagtggaccaagccttccccgtcacctcctcagtgctgccactatgtgaccacatacccagtaccttctctcattaccttttctcttctcttttggagaactgtccccaaaacaaatagaaattaaaaatccaaagataaaaataaaaaatggaaaatagactagtttttaaagaaaaaagacaaaaaaaagtggtcttgagcatggaagaagggcttcaataagcttttactatgtctgcaatatttaatgtaactattaccaagtgaaaaaacatcatattataaaatattttataccatacaatacgaatgttgattttaaagtgtgttttaaaaaaaagtacatcaaaatgtcaatgattatctttggggataagtttatgagtgattattaattttttctgtatttttcctagagcttttccttatttttacatagtacatagattattttagaagccagaaacaatgtttcaaagagaaaaaagtctaactaggtaaaggtacaattatgacgtcttactggcaatcattggtgaggcttcctggcataagtgtacactgcctctcccagccaagcttcgccatcacctcctctgtgcttgcccttatgtgaccatatacccagaaccctctatcattaccttttctcttccagctgtcaaggtagcagccaaattactgatccctgtggttccaaggaacttgcaagtgtaatagaagcaattcctgcattgtcttctctatacttcctcttattctcaggcttcacagtttggcaggcagccatactactcttatttagacaaaggtgctgggttgaacttagagaaagcatcatcccaacaacttggagttaaaacttgtgatgttgaaaacaattttcagtgttactaaaattctggattcagcagtgctgttattattagatgtcttatgccataaggctggtgttaattccttcctttacactttttcctttcctttcaaatgctctgagtatcatggcacttcctgatcctctgctgtcacagcaataatggacctggctccaaaagccaagaagaatcccttggcccctcaccctcacaccctttgcagatactaaaagatgatttttaaacaaacattttgttccctcctacaatatactatttggggttttttgttggtggcggcgggggatgttcttcaaaaaaaaacccacaaatatttgctctaaaataacacttgccttacaaaatacaggtacccagttattaaaaattaatgctttgggacaacaatcctagtctccaaaaaacttagatcattattatagctatgtgtgatgaagagaaaaagaaattcttttgttgtcccaaagcattaatttttggtaactgggtacttgtattttctaatgtgagtgttactttagagcgaacatttattttaaaaagaaaagaggaagaagaactccccccacaaaaacaatgtataccacggaatacagtgcagccaagaaaaagaacaagatctgaacccagaaggcagaggttgcagtgagccaagattgcaccattgcactccagcctgggcaacaagagtgaaactcatctcaaaaaaaaaataaaaagaacaagatcatgtcctttgtagggacatggatggagctggaggccattacctttagcaaactaacacaggaatcaaaaaccaaataccacatgttctcacttaaaagtgggagctaaatgatgcgaacacatggacacgtagaggagaacagcacacactggggccttttggagaaggtgaaagatgggaggaaggagaggatcaggaaaagtaactaatcggtactagctttaatacctggataatgaaataatctgtatggcaaacccatgtgacacaagtttacctatgtaacaaacctgtactcgtaccccgaacgtaaaagttaaaaaaaaaaaaaagaaacagaaaaatacttcttcagaccagtacaccatacattacttattttgtgccacaaccacagagtgttattagccaacactgagaaagatggcattatcttgagttgttccaaactcggtgcatttgctttagtttcacatgtcagtgagtggtggcttcagatacatagacaggataaaaatatgaatttttatgatataaaggaatacttcatttgatctgaagtcatgggaagcagacaaatcaaaatatatcctgcagactttgttgtctcaccctccctaatgtgtgtgtgggtcattttgagaaggtagcgggatggcccttcaaagcgtcagtgccttctattgttagtccccaggcactagagaggctgggagctaagaaaccacatgttgttgatgttattggttatgcaatagagaagactgtgtccaggccttccttctctctgtaacctcctgccatcctacaaaccccagggtctgctctggggaccatttcagatcttggcaagcagaactatagaaagtagcagtagaatattttagggtatagttttcattctgttttgagggcctctatcaaagtataataactgactgcttacctataatagcctaaaactttgctacctctggttttatctgtagttttttaaatattgttcttcatagtaaatagacatcacatcgtaactgtttaattactttgttatatattacctaaagtacttttttctcagtgaacatgaagttgtctcattgtcagacatacttttcacttttctaactgttctgctaaataattatggaatggaactgcttgggattaatgcttttccaggaagctctcaaaggtctttaaggtcaccaaatgtgaattcagaatccagcagctaatcataggttgaaataatgggggcattttaaccaaggccatttctttttataaggcaacttcattgtgggaaaattttctaagaggtaatagacattgtgaattcaaaggcaattatattgttaagctactattatcttcctcctcttttgcatttgaagaaattgctaagctttgtttcttccatcagaggagaagaaatatgaacaagtatcacttctgaaagaaatactgagaaattcaagagagttaagtgtaactatatttcagtctgtaatgccataaggaaggagctacatcttacataaaataatagccacaaaaacatgaagagtcttggttaaacatgacaaagaatcacttgatagagaatctataatataaagctaaggatcccagtgcttgaaacagaatcttaggcccaattcttcctgtaatgtgttgctaaaagagaatatgaaatttcctctccagaaggtttttacaaatggctttaattctcttctctgtctcagctctcctgatgtaccacccaacagctgatttttcttataactgaaccttttctagtagcctcaggtttcgcctgacttgagggacaaaggaaggaattcgaattgatttccaacctacttcttgaatatttacaaggccaggccttctaaatcttgaatcccaaccagctggaagcagttcatcttcctttgggctcttacagcccttctttgtttgctcttagtaccccaataatctgcctggttagttgtctatttctttatcttccctgatagatcataagactcgtgtaaaaggaactattttattcagcgttgggttcccttctctgcttcacaactatttaatttaattaatgttttacatatttgtgcctctttggacctgacggttttctccatccgcttccacttctctacccccccatacatactcctacccagtgtgttttttcctttggatctcctccctccccagaaataaaggtttacccttctatcctcacaaatcagtaaggtttccagaagacctcttctaatcaggcaacaattcctactactattcttgtctccatctctcagtcagcaccagtttttttctctccctcctttgttgttgtcaaagcaattctatttttaatttttgtccattcaagatctccccaccctcacagaaaacaaagggtgtgctcttgggagggagttatggactatggaaggagaggtttcaaagtccagctttagagcaggctggtgagcttgtcaggtgcctgatcgtcatcccccgtccttggctggtcgctctctgccctgatgactgccgctcagtgtaggaaggagacagctctggctgccctccccagagtcatccatgctgggaaggatggaggaggggtggaaagttagtgagagcctgcatgtgctgctgcagagatgcccaagatagcaggagacccaatctgtttcccatttatatattctcattgctgatagatgatggacatccttcatttaggtaattattattgctattaaaatattacctgaaagggtgcatattattgagcaaaatgagtgcctaagtgccttatctctcccacttaatatttctactgaattatgtattctatttcttactaatagagaaaatgaagttccttatgcctttctttagctttattaggagatagaactaattttgaggaagtgctacaccaggaatgcatttgtttccctgaactgtatataagtaactgagctggggcagtgtgaaaggaaagagaggagaggggaggaggaaaggagatgggaggaggagaggtttgttgattaccactctatgccagatattatgctagagagcaaacagaatactgaaatcacctcctccaactgcccagaaactgagtgaggtaggcatattcccatttgacagatgaggaaatcaaggccccaggtcacatagctaaggattgagccaagattcaaacccgggcctgagtctagagttcctgatcttgcttcagaaattgtcactgttagagaagacttgcatagctgccaaaagatacatgctaatcttctaggattaaaaaagccacagaggtggatgacactggttttcctccataggaaagctctagtttttactgtatgcagatcttcctgaaggatgtttctaatatgaaaaattttagcagttgtcttagagcttcttttcttgatttcctcacagttagtttctttataaacaaagtattaatagaacaacttagggcaaagactccctccacctgtggcatatgtctcccagaccacgttctctcacacaaaagagcctggtaccccccgaaacacaaaaattcacttaactatttttttttccctaagaaaagcaagatcctgttaccaaaatgactcttaaactcttctcaaaacttcattgcaaaggaaatgaaactattaaaagaccattgctctgtaattcaggaaattgaatcaacttgtttggagccataggcagaggaagatttgagctgtactgagccacatattgtgagactaaacagtgccctgctctgaaatgattttaccattcatgagctgtctctttataacaccatggagctcctcaaatgcttccttttctttactacctaaaattacagttctctgcacaaaatgaaaatacttttatcagatgttcacatttggagtgattttttaaaactttcatttcaattttccttaatgtttctatacttgtcaaatgcgtatgtctttttaataaataaaagatacatgatacatacatcttgaggctgaagaatttctgcagacgaaatattgatgattgagactggatgataggtttgtgagagctcattatactgttgtctctactattagtatgtattttaagtttttcataataaaatgtttaaaatatttttgtaattctgcagaaaaatttaactcacattgtctgcgttcttcctgtactgctctacccagagagcacagtctttccatgctcctcccactaatttaacactagtcaaattttggcattttgaccaaagaaaggaagggaagggaggtaaattgtggttgggctcaagagccatgatatgctccttcttagcttaattaaaatccatgacaagcacagccatcactcacattttagattctagattgctgctgtagtagtcatgaattgctgcagaacaggcaagaaatgacatgtttttttttgtttgtttgtttgttttcccgaaagctaattgaaggctgggcacagtagctcacacctgtaatcccagcactttgggaggccgaggcaggcagatcacttgaggccaagagttagagaccagcctggccaacatcgcaaaaccccatctttactaaaaacacaaaaaatgagccaggtgtggtggtgtgctcctgtaatctcacttacttggaggctgaggcataagaatcacttgacccctgggaggcagaggttgcagtaagcctaaactgtgccactgcactccaccctgggcgacagaatgagactctgtctcaaaaaaaaaaaaaaaagaaaagagagaaagaaaaggaaaggcagaggcagcggcaggggcaggaatggggggcggaaagggaagggagctaattgaatctagcttcaagccctcgtcgtcaggtttgggaagttcggtatcagtgactgagtgccttctcttaagaaaattgattgaaaacttgtaaataaggcaacaagactgctgtgtacctttttaatatcatactagaacactgtgtagcaaaccttcctaaagactattttatgctctgggccctagacctgtccagtatggtagccacgtgtagctgttgagcgcttgaaatgaggctaagtacaactgaagaactgaattgagatgtaccataagtataaaaaacacgttggattttgagcacttagaacaacagcaacaaaagtctccataatgtgtatattgacacgtgttgaaatgatactattgtagatatagtggtttaaaatagtaaaattaattttacctatttgtttctttaactttaaaaaaatgtggttagtagaaagtttaaagttacatatgtgcttcatattatgtttctgttggacagtgcagccctagagtttctgagaaggtaactttgactagttatttactcctgattagagtccagactgtgaagttacatgttggcctatagatgattaataagctgcaaatgatttctatttatagccaaaaggtaaccccaaaagtttgtgttcttatggccctaggacataaatcattttgtgtctgacttggtagatttcatccatgttttattttccttaaaagtttgactaaatttacctctgatggttgtaccaatcaaaatgttgttatacgacagagctggaaattctctagctcttcttgtactaagtccttttgatcaagtgatataatggatataaatttaagtgttactctgtgaattgtttattatctgtatatttggaattatgcttctgaattgtcttgccttgtttccttaaaaggacagtgaaagggaagtgaaaatattgaacaatgctgatactgaataacaactattttctttcactctatctgcacctgtgtttgtgtaaataaaagtagaggaactgtgacgttttaaaattccagacctccatccccaaagaaaactttccaaaggtcctcattcccagcatcggacccacaaaaatgtcttgccctcccctgcggggcacgtacagcccttcttctctcatccataaggaagagggttctgttgttgttgttttgaatgagcccatcataaaagcagcagaaaccatttgacagtagccatgctactgtttctgagtacccagaaggctatttgtagccttcgtgaacacttgctttctaagccttttgaaatcacgagagatagcatagcaaataggaacctgttgtatattccatttggctatattttgtttgtttgttcatgttgtcagctcactgcttagaatctaaggagacaagaccataataaaggacagtgtagaagacctgaagttttaagctccaaatctcttagctaccaaaataaataaatactacagagctgtttgtgagcaagagaaaacatctagacagagtaaggctaaagtcctttttccttcacccctaccctctcctcttttgcatctagagatttggaaaattgctagaaccatgaattattaggtatgatgttttattttattaggttggaatgaaatacagaaacctaatcctgaaacctgggggatctctggacggcatggacatgctccacaatttcttgaaacgtgagccaaaccaaaaagcgttcctaatgagtagaggcctgcatgctccgtgaactggggatctttggtagccgtccatgtctggaggacaagtcgacatcaccatgtgttactggcctggaaactgaagggagttttgcaagtgaaaatttagatttctattgacatccttttgttttctaattttaaaaattataaagatgtaaatggaattataaatactgtgacctaagaaaagacccactagaaagtaattgtactataaaatttcataaaactggatttgatttctttttatgaaagtttcatatgaatgtaacttgattttttactattataatctagataatatgatataagagggctaagaatttttaaattgaatcatatatatgatataatttgatccttcttgtatcttgaagttttgtacttgggatttctggactgataaatgaatcatcacattcttctggtaaatattttcttggagctctgtgtcaactttgatcctttgtctcccaggaaggtgtgacctctcctttgcctgcatacctcaaggccaggggaatatgcctcagtgatgcatttatctttgtatatcaggccgcatgattcccaactttctgccacacttaaattacgttcctccatttcagttttgtcttttctgtctaaagttcagtcaaagagtatcaaaaaattatgtttcagctagactggtgtaatgtataagtttttgtatcttgtattagaggatttcgtagcttttattagaggctcatttccacctcagcatacaagatcgttagtcttttggcatgtgtgccaattagaatactaaagcaagtccaagcacatttttctcttctcacgtttctaataagtgttagggactttgcctcttttacttaccacgtccccaaaagtgtcaggtagacatgtcacaaatggctctgtagagagccatgggaagagagaggaggtggatgtggaacataaagggttcagaaactccagaagaggagtgggttttggatagaagcatttgaggacagctgctccaaagccttatgtgtatgatgaaacttaaccacggggaagagactcttcagtagcctgttctgtctggtgatttttattttaagtgaacctttggatctatctttaactctctttattgtgagtctaaattccaattctgcagcagatcagtaaactcacagtatttttcctgtggaaatctattcaataaggaaaccaagacaggataataaaatttaaaaaaaaaacaactttgaattcccctgcctaggtcttccagttgttttccagcgcatacctcaggtatgactttgctagccggggacaaaattagcaccttccgattctctagtccaaatgaactttgtgctaaataaaaaattattatactacataataaagttacagatagcaggaaatgcaagagctaggagattcctagattatatctgccaagcaaataccttaaacatccacctgaaatcctactaccccctcttctgagataatttgcccagcccttctcttcccacacactcactcaatgtcacccccttctaatccccaaaactgtttttgtggtctttgtagcctatagtagttttctcacatctttccccctagacttttctgtttttcagtttcagacaaaaaaactcttcagctttttccagtgtgtctccttaacagtaactttaccacttgaaatcttatttcatagaaaaactaaattggtgtggaaaggctgcacacaataaagttatattattatccatgaaaatgaactcatatttctttcatactttaacgttaaaaccgaaatgcatgagagcaaaagcaccatggtgttctttctatttagggcctacctctaatatttaaaatctaccaaagagcagtcacaaaattaaaactcagcccgggcgcagtggctcatgcctgtaatcccagcactttgggaggccaaggcaggaggatcacctgaggtcagagttcaagaccagcatggtcaacatggtgaaaccctgtctctacaaaaatacaaaaagctgggcatgatgttgggttcctgtagtcccagctacttaggaggctgaggcaggagaatagcttgaacccgggaggtggaggttgcagtgagctgagatcatgccattgcactccagcctggacgacagagtgagattcagtctcaaaaaaaattaatactcaaagaattatctagcataatttaaaagaaaggactttttaaaaattctctagcataattcaaaagaaaggacttaacttttttttttttagtgtggtcatccgtctagttgttctttttttccagatcagagcagagaatatcactgacatgcttgaaatggtggataactatgtaaattgtaattggacaaatgtacactttagatttatggactgagccacatataataaggtctctcctggtaattgatccaggggatttaggcctctttcgggttttttgttttttttttaggcattgttatgttgtgaaggataaaatcttcaacatcttatgcaaatggatagtaggcatgatcctaaaggtttagttttacgatgctgcagagaagagaaatgtcttgacgttttgccacctgatgtagactttgtccccctctagtataaatgttgcatgttacctagataaacaactaaaaattgccttgagttatcacctgagctacttatgccaaggtcttgcctttctaaagctaataaggtgagaggtggatatctgtagctcttcggatgaaaaattgcattgtgggagataccaaaattgaggaaatagctcttcaaagaaaaattactgatatgatcattgtacttgtaaatgccttaagtagcaggcagtgactcaattttctactttaccattttacctttagcttttatgtatgaattataggtctgtggagattctgcctccccactaggccagtgtgtgtttaccatttattcattttctatcatacacaggtggattaaaatttacattaaaatttacattaaaataccatcatacttcaggcttctataacaaaatatcagactgggtggcttcaaaagcagacatttcttacagttctggaagctgggaagtcccacaatccacatgctggtaaatttggttcgtggtgaggcccctcttcctcttttactgaccacatccccaaaagtgtcaggtagacatgttacaaatagctctgtagagagccatgggaagagacaggaggcagatgtggaacataaagggtttagaaacttctgcaggcagcagtggcagggagcaagccctagagtgtctctttttacgagagcaggaatcccatcatgagagttccttcctcatgactttatctaaacccagtcacccccaacaaaggccccaccccctaaccccatcacattggctgttacggcttcaatgtaggggatggggcacaaacattcagtccataacgaatactgattcctcaaatagggtttaaacatagttaactgagcccccaaagaatgttaaaagagaaaatccattttatttgaatagatgcagtgaccacagcttcttccctcaaatcaacacattacagttagatgtctcccatctgaaattggatagcccactgaaattgaacatgccttctcttataaatgtgtggtgagaataaaagcaacaaagaaatgaatgtggtggctcacacctgtaatcctaacactttggaaggttgaggcaggaggatcctttgtgctcaagagtttgagaccagcctgagcaacacagtgagaccctgtctctacaaaaactaaaaaaattagctagggatggtggcacatgcctgtagtcccagctacttgggaggctgaggtgggaggattgcttgagcccaagaaggtcaaggctgccatgagccataatcacgccactgcactccagcctgggtgacagagaccctgtcttaaaataaaataaaaaaaaaaggaaaaggaaagacatacataccctcagttcttcgaaaaacagtcaacgtccaaaaagtttattttttgagtcacctttaatagagaaatttcccactggaaacagatccacctaagtgattatctagtatcagctgtatcaaggcaaaaggtaaaggttataagatgtaaatattagaccaaaatagccttttttaacaaacacaataatgctgtacgtctgtaacaaaacaaaatttgaaaaattgaggtaatgtacacagcgatgcacacacccccacaccacaccgtgattcctgagttttgatttggttgaattcaccttgtagttccctttcctgagaaaatacaggttcaacacatctagtccacgatgtacgtacaaggggaaggggtgaacaggaaatagactcccttattctgctcacatgagctggaacctgtactagctgcatatttcatagaccccagaggctcacctcaattgtactcctatgataaaatgtctctagcatttgtcatgagagaaactggctagaaatagtttgttcattgcgtccagcaagacacgcattgctgttgatatctttgtggctaagatggagaatgtgactggataatagttatccaggtggattactagctattgaaacagtctgagatagttgcatgatgattaacgttaaactgggagtaatttcaagtcatttggctaaaaatgaaaaaaaagtcccataaaaaggtatcaaatgtacagataatagggctggaattattaagtatgatgatgttattaacatctaaaattattttggccgggcaaggtgggtcacgcctgtaatctcagcactttgggatgccaagatgggtggatcacctgagttcaggagttcaagaccagcttggccaacatggcgaaacccgtctctactaaagaatacaaaaattagccaggtgttgtggcacatgcctgtactcccagctactcaggaggctgaggcagaagaatcatttgaaccccggaggtggaggttgcagtgagccgacattgtgccgcttcattccagcctgggcaacagagtgaaactcttgtctcaaaagtaaaaaaataataatgtttaaaaatatttcaatgtggagacaagctcaaaatgaaattagacacattccattacccaggtaaaagaaggggaagcctgacttgatagtagtattcaggaaaaaagagttggcagttttatttggccaaattccaatatcagctcatggtacagcacaccgggggagggggacgggaggcgagaactaaggctttttaagaatgtgttgatggaagtatgtgcctagatcaaaagaataatccccccggactccagtgtaagatcaattactgttggaatattgtgttcctttctagatatcacattttaagcagactttggccaagtagtacagtgtttgcaggagcagtaacaagatggtgataactttgaaaatacttctcaaaagaaaaataaaaaagaattagggaagttcagtctggagataattcagaaatacagatgataattgttttcaaattcttgaaggaaatgggagagagaataggctaattctgtattgcttcagaaaccaaatggaaacaattaaattccattagagaaacggttggaaaatatgaggaggatttagttcagtacgaggaagctgtttctaatactttttgttggttaaaaatacattccgctgctgtggaaagcctgtagctgccaggagtgttacagagggcattcctcccttgagttgacatttgtgccaaaccggcttttagggcttctccagcttttaagatgcgataatgataagatgatcatcgggaaaacatccctcagatgaaacgttcacaggctggctctgaaaactggcattcagatgattgcggctcccccatactgtaggaatattgtttatggcttaaggttgcctcgctcctcatctgtaatcagtgaaagtttatccagaggttaattaccggttttctggtgggtatctgggaactgaggatgggagattaactgttgtatatgaccatagtaaagcaaaagactgttagagaatgagtaaacgttcgttttcctccctacagaatttacagttactctctgtccattccactcactactgtcttcatcacacacacagaggcaaacgtctgattcagatagccaggtgtgccatgcatgcactccaccatattgtgatctcttcgaggcttgtttctgtcccctgtcctccacagtcctggattgttaatgaatagttcatacatgtttgttaaataaatataccttctttaaaattatcttttgttataaagatgcctttttctatggtaactgcaaaatacctaatttgtaactaaacctaaaactatgtggataagttatttctacacctgcggggggcagatttctacatgagagtcctttcttagtgtactgagagtttctgcatgaggtaaatgaaagaaacatgttttttgtaaaaaaaaaaaaaaagaaaagaaaaaaattggcaatggagaacgtttctaaagcttctcagcttctccctatgattatgtattgaaacctcggaatttgttcatctggttttcttggggggtctatgaaaagggcagagcaagcagatgtcccatgattgccctgaaattatattagatatgttcgtgtgcatggatacctgcatttttctagggatagagtccttagctttaatcagaagaaattaagaactactgtctttaaaaatgtgctttcaaacatttgttttttgaattcatttcaaagactctaacgtgcccattatgtgtcaggcgctgtgcttggcaatgaggatacaaaaagacaccccagaactggagctgctcacagtggagtggagaaggcaaatgagttcataatttattgggataaattataatagaaaggcatgtatccaaaacttttctgtgttttcccctcaaccctggttgactccactatacaatttgactgtggtgccacaaaattttacatagttaccacgccacctgccaccgcaggcttctatttttaacaaaataattgcttttctcttttcagcatttcaggagtgggaccaaatggtgttctatatctggtatatccaggagtttcttagatctggtagttaaagggcttataaaaaagagatgaaaatgttcactttgccacttttgtgcaagtggttataaattgacagccattagaagaatgatgtgggaccccttttaagctgatatgtattagatagccaagaggcattggtacatcctataagtctagaaaacaggttgttaaaataatcactgagttgtttagagatggtccagattagtcaagatttcttacttcctgttcccagcaactttttttttgagatgagatcttcccatgttgcccgggctggtctggaattattgggctcaagagattctcccacctcagcctcccaaagtgctgggattactggtgtgagccactgtgcgcggccccatcagtgttaataatttccattaccaccagtaagagccaaaaaaagcaccctagcatttcaacctcttactgcctatttgtgacttctttatgtagggatagaaactgactaaacagatcaatggaagactaaagaagcctcagggctccaaggttcagacaaagactggggctggactttaaacttacactccattcccttctgtttctttaaataatcatctgcttctcagaaatccttgttttagtctatcagacctatatattttattttcttgtcttttacttattcatgtaattatttaaatttttgatgagataatacatttgatgagagaaagtggtaggagtgattccagacaggaattttctttctcttttaatgattggatggataggtcttaaaaggaatgtaagactttattccagaacaaagcagtcatcagtccctttgtattcagggcaaagtggggaaaaccaaaagatacattttgtcctccctgttccaaatcagatgcctttctatggtcttcaacatttgtgtgactgacaagtgggacttctgttgtaattcacaatgcaatcactgttctcaacatgcacatggcccactctgtctcagcttcaattataaaatcttcagccagaggctattatcctctgttttgttcagtcagcgagatagccagtgaatttccaactgagatcaggtggcaggagaaaaatttctcacacttcatctatcaagccgttatagaccccagtatatttcctccactggggggtcctgatagggaagtttttctgaagtcatttgggaaggtgtcctaacattgcatttccattcctaattccaccttaggtgagggcagggaaataatagcttaagaaaccgtaaattcacagagctccatcctcctgtttcattattttcatgtcactaatttttcagtagataagctacatcctgtggtctacccagccatgtgaagcatttctttctctcctgcccacccttcctttctccccaaagtccaattaaataaatgaaagattctgggcaaatctctccaaatcccagcaggaacacaacagaagtctgaggcaaaaaacatagttagtgaggccatggacaacaaatctaggtgctttttaatttgggagtgggggattggaggcttttctgtgaaacaccctagttttaaattacagtcagtgtcccagtgcctgccagctaaatgagaggtttggaaggattagggtaagagtagactatatataaccacttctacaagtaaatgccttttaatttttttctaacataaatattgcaggaagagtaaatgccttttttaaatgtctgtgcaagctaggcacggtggtgcattcctatagtcctagctcttcagaaggcttgaggcagggggatcgcttgatcccaggaatcagaggctgtaatgagctatgactgtgccactgcactccagcctgggtgacagagtgagacattgtctcttaaaaaaaaaaaaaaaaaaaggtggggccgcgcatggtggctcaggtctgtaatcccagcactttgggaggctgaggtgaggggatggcttgagcccaggagttcaagaacagcctgggcaacatagtgaggccccttctctgcaaaatttttttttaaattagcctgctgtggtggcacacacctgtggttccagctactcaggaggctaaggtgggaggatactttgagcctgggaagtccagactgcagtgagctgtgattgcaccactgcactccagcctgggtgacagagtgaagtcttgtctcaaaaaatgaatgaatgaatgaatgaatgaatgaatgaatgtctgcagaatccagaagagctctatggaagatttggcatctttgaaaactcattgaccaaattttaagtataattatgaacttgttccaggaaagccaaactactatctggttgacttttatcttctgaagttcaagttaatggggaggtgggggaaaagccagttaaagtcaacttgtcttataagggtggtgagtatttgtgttaaggcatacaaaaacctgattaattcctctgtctacctagtaagtttcttaataccctatcagaattcagctggagcactagtagagcaacacactgttttctcttgtgccagtagacaaaatgtcagaacgcctgctgcattcctctgggataatagaaatgaagtcattacgttagaaagtggatcatgtgcccaggatacacttctctcaccctgaacccagtgactctttcctgggttaaagttactgatctggtggcagatgcagttctggtagccagaagagggtgagacagaagagccacttaaggaacattgaggttttatgatatttgaaatggcaatgacagattggtgtggtggctgaagtacagatgtgcctatcagaaggtgaacaccaagagggaagtgttaggacagagagccaagaacttgattgctggcaagtgctggcttgaacaagggcaattgctggaatctaagaggggtgctaatattcaagagaagaaggtgtccagtttcagggctctccttgattagcaaacaattgttttgtaattcaaggtgactagaagttttacttttcaaaggtactgtaagagactgtctaacctcctccaaaggattttcaggacttgttaaccatgaataataaaaggtatgagttcatggccaggtgcggcagctcacacctgtaatcctagctctttgggaggctgaggcaggtggatcacttctgcccaggagttcgagaccagcctaggcaatatggtgaaaccttggctctactaaaaatacgagaattagccaagtgtggtggcacgtgcctgtagtcccagctacttgggaggctgaggtgggaggatcacctgggcttgggaggtcaaggctataataaggcaagattgtagcactgcactccagcctgggccatgacagtaagaccctgtctcaaaaaaaaaaaaaaaacaaaataaaataaaaggtatcagttcaaacaaaactccttaaaactactttattacctcttatgtataaaaacttttgtagtcatgttttaatggaatattaccaaagttgacctttattgtgcctgtcagaaaaatctggctgttatcttgggttcctaaaggaagaagtaataggagctgtttggcagacttgacaacagtttctaacatttctaaacagtctaatcaataatcaaaaggacaggcagggcttggcgactcacgcctgtaatcccagcacttttgtaggctgagatgggctgatcacttgagctcaggagtttgagaccagcctgggcaacatggtgaaacccctgtctctgcgtaatacacaaaaattagctgggcatggtggtgcatgcctgtagtcccagccacttgagcctgggagatagaggctgcagtgagcgatgatggcaccactgctgtccaggcttagcgagagagtgagaccctgtctcaaaaacaaaaagacaaaacaaaacaaaaaccacagaaggacaaattgtttggctcaaccctctagaaaccataacaatataaataactctccccagtgaattgtttctgtcttaaatcttggaaataatcatttttatcgtgatttttatcatttttatcttgaatatttgtttccacaaatctcaccctcttcctccatcctcttatacacattctcacaccacgttctttaagcaaagaaaatatactttcaagctaagtgtttcttttgatgctaagacacttaaaaaataacagtggggaaagcaaaagaaataaatgcttattcctttcccatctggattttacaaagcaaactggaggagaaaacaatacaagctcagtcagtatgcattttatttcctcctgccgctctctcactctgcttgggattaaatgttcccttagtcctcaaccaaaatggcaatatgatctcatgtttgtttattgtgttgtctttgtatttcctaggtcaacagggtgcaaattttgatttactgatgtagcttctctccccaaacacagagaaattcttcagggagcttgctgtaagcatatccaagtgcagctgaatctcacaggtagacattatataaaaatagagtaacactttaagatgcaaaagtggcatcattcagtagtgccatctctgcactccaggtgcaagtccaaggattctaccaaacagggttgccaaatactaattaaactaattggttatcaatgctgttcttaaatgttatgatcctggggtttctacaatgagaagaaaaggggatgctttccattccccatacaaaacgcataaattctattatgtactctcaaatcagcaagaaattaccaagaaaaaaattatcttgtctgaaataacaatttggagagaaaatgaccagtatctgtatatgtgtatttatttccttttatcttgtcatttctctatgtccaatacataataaactttaaaaaacaggctaacatatcaagatgaagagattcattatagccactatgattttctatgataaaagaaaaaaattttttcaatacactaaaatgggataagctcaacagactagagagtttcaaatgcataggaaaaggaaataaaaagagataaaagaaattataatacttctgaaaccagcaatgtgattctgcttcacactcatgcaactggcagcaatctagctactaaggctgaagatgagcacacccagtagttccactccaagatatggaccgccaaacaaacttctacatggacaccatgagatatctactacaatgttcacagtagctttgtttacaatggcaaagcattgaaaaccaccaaagcatctatcagcagaagagtggataatgtttatttgaacaatgggctgtattgtaattaggataagggaactaaagctccatgtatcaatgtagatacaactcaagagcagtgttacaatgccattgcagaagggttcgttcagattgccctttatttaagttaaaaatatatatgtaatatatatattcaaaataatgatgtatctttggtggagctatacatactagtataaaaacatccacatgaaaatggataataaattcaaggcttcctctgatgagggagaaaggagaataggattcagaagagatatacaaggagctgaaactacaactacaataaatgtttttatttaaaaacccaatgcaaggccaggtgcggtggctcatgcctgtaatcccagcagttttgggaggccaaggcaggcagatcacttgaggtcaggagttctagaccagactggccaacatggtgaaaccccatctctactaaaagtccaaaacttagccatgtgtggtagcgggtgcctgtaatcccagctactccagcacgagaatagctggaacctaggaggtggaggttgcagtgagtctaaattgcaccaccacactccagtctgggcaacaaagcaagactccatccaaaaaaaaaaaaaaaacaaaaaaccccaaatatgtcagtatgttaaagatttctttaagcttttgttttttattgtttgatctttttaccatttttaaaaatgcttctgagtgatttatcagaacgtgtctttcaaagcacatttttttaaaccagaaatccatctgacttctatcatgcaaaacccaggcatatgggattcccacatacagttgtttctaaagactaccccttggatgtcccccataaaacccaaaaatgagcatcctaatctactgaaaatctaaaataattgaagtcatcacacaagaagcatagaagttaggtggcctgcctcctgccattttgattattctgaaacaccttttcttgctctgggcattagtgctttgagcagagggagatccctgggcttagcctcaagagttgggttagactcctgactgctccttcccgggttgtagtgctcaatcagcattcattatcattccctttttcctccttcctaacagagccttaattttctttttttctcttttttctttttttttgagacagaatctcgctctgttacccaggctggagtgcagtggcatgatctcggctcactacaacctctgcctcccgggttcaagcctcagcctcccgagcagctgggactacaggtgggcaccaccatgcccggctaatttttgtattttttggtagagacagggtttcaccatgttggccaggctgatctcaaactcctgacctcaagtgatccactcacctcagcctcccaaaatgctggtattacaggcgtgaggcaccacgcctggccaagagcctttattttcattaagtatcccaagtcatctaaggataatttcatgcctcttgccaataattgattcaggaataggtatgtgaattaatcaagggcagtgataggtgaggagaagtttgctaaggactttaaaggaaagtttcctagttttcaagaaaaagctacagaaagaaacaatctcttcctctggcattattgtgtgcagatttgaggcccagaactagagaaacagagtcagcgcagctaggtatgtcagccctgaagaccacctctcacctctgaaggttcacacaagtgagccaatatctttctgcattatttaaaccagttaagatagatttttgttagctgtggccaaagacattctaactgatacatacatacatgattcagcttctgcagttgtcagcaggtatattaatttctgccttgctagttccttcagtggttttggaaagcaaaatgattcagtgcatgtgaatgtgctttgtaaactgtaaattgctattcaagggcaagctgttactattagtaataattttgctactaagtcttaggtcttagataccaattttgtttctttctttttcatttttatttttttaggacaggatgttgctctgttttttttttttttatttttatttttttgagacgaagcctcgctcttgtctcccatgctggagtgtgatggcacgatctcagctcactgcaacctccgcctcccgggttcaagcgattctcctgcctcagcgtcctgtgtaactgggattacaggcacctgccaccatgcgcggctaatttttgtgtttttagtagagacgggggtttcaccatgttggccaggctggtctcaaactccggacctcaggtgatccaccgcgcccggcctgttgcccaggctggagtacagtgacatagtaacagctgacctgttactcaggagcctcgaactcctgagctcaagcaatcctcctgcctcggccttacaaagtgctgggattacaggcatgagccattgtgcctgccagatacaaattttaattcactatataaattgtatgtcttagaatgtatttaactcatttattttaaattgatacttccagtgaccttatgagcacttacatatcatcattttacatcatataaagcagttatatatttatagtatctgttgaggatattttcagcaattagtttttatataaaggccctaaggccttttgaatagccattatgttaaagggttaaaaaatgtccacaaaatagggtcttcttacctaaaaactgatctttagcatatcctctgtgtcagtatctacatttgtaaggagggttttcataaaaattaagggagacagtacatgtgaggtactcacagcaggacctgaaacatagttaccagcagaataataacagttcgacctaacactatgttccagggatgttctaagaacttcacattaatcgactggtactgcagaactgtattcttgttctattgcatttttaaatttttaaaatagctttattgcttaaggaaaaatgtcacatttttattatttagacaagattgggcgtgctgaaggtattatggctgtagacacatttttattatttaaaaaattcaaatacagaaaagtatgaagatgaaatgaaagtcacctcaaattccatcttgttacttgtaggctggataagcaaccaggcctttgtgtttactaaggcaggtacacatatgtatacacacatatacacacaagtatatatatgcacttatagtgtatatgtgtgtgtatatatatacatacttatgcatacataagttatttccatatgtactatatacatgtctatttttagttggacaaaaggaaaaactggcattattttttaaattatagttgattccacatcctagggtatgaaagaagccagatttttcatattgtttgggatattgcttgtaagtgggtagggtctagttaggcagcagatacttaaatacatatttacttaaataaggtcatactgtctttttaaatgctcttaatttttttaaaatttaaagtagccctttagtcacataacacatcgctatgattttttacatcataattacttacttctacccaatttctcttgtttatttattattctccctaacagctgccttttttcttttataaaaaaaaaatttttttttttttgagacagggtctcactccatccccaggctaaaatgcaatggtgtgatcgtggctcactacaatctcaaactcctgggctcaagtgatcctcacagcctcctgagtagctgggattatatgcatacaccaccatacctggctaattttttcttattttgtacagacaggttctcccatggaatcaacctaaatgcccatcaacagtaaactggataaagaaaatgtggtacatatacaccatgaaatactatgcagccataaaaagggcacaatcatgtcctttgcagcaacatggatggagctggaggacattatcctaagtgaagcaacacaagaacagaaaaccaaatactgcatgttctcacttacaactgggagctagacaatgagaatatatggatactaggaggggaacaacacacactggggcctacttgaggatggaggctggcaggagggagaggatcagaaaaaatacctatcaatactacgcatattacccagatgacaaaccccatgacactcagtttaccgatataacaaacctacacatatacccttgaacctaaaataaaagtaaaaaagggccaggcatggtggctcatgcctgtaatcccagcagtttgggaggccgaggctggcagatcacctgagatcaggagttcgagaccagcctggccaacatggtgaaaccctgtctctactaaaaataaaaaaatacaaaaattagccagatgtagtggcaggcccctttaatcccagctactcaggagctgaggccagagaatcccttgaacctgggaggcagcggttgcagtgagccgagatcatgccattgcactccagtctggggacagagtgagacttcatctcaaaaaaaaaaaggagagagagagattgagagagagtccctgcccaggctggtctcgaactcctaggcttaaaagatcctcctgccttggcctcccaaaatgctgggattataggcataagccacaacacccagcctctttttagaagtttctaattgtggtaaaaactcataacaaaatttaccatcttaatcattttttagtatgtagttcaatagtgctaagggtattcacatagttactcagcagattaatagaactttttcatctcgcaaaactgaaactgtatactgaccaaacaatccccttttcctcctccttccaggccctagtaaccatcattctacttcctgtttctgcgaatttgcagcagtcgtatattttatgtcaatttatattctccagcacctagtatagtcatgctccataaatatttgttaagtgatgaatgaatctgtatttgagctatacacaaacaaatgaaacaagaagaaagtcacacagcctcatctgtactaaggaatcaatacccgctgtcttaggccattcttgccattgctataaagaaacacctgaggctgagattttttttaacacttcagcaatttgtctaaggtctcagcatttgcaaagtggcaaagttataattcaaactcaggtgtgtctgattcccaagcttgtcttctttgtatgaggttatgctgcctaccctaagctctgccgtccctcgtttccataactggccccactgagttcttcaccataggactcagtctcactattttcagattattctcagatttatacatctctgggacaggcaatacatttttggctatgtctttctccaattttcgaagtacaaggcaaataaacacagtgtgtttcctaggacaagagtcattacctctcagaagcttggattccaaatctaaaatcatatacttaactgatactcaatgacaatgtgattgagagttctatttgtcaacttgtctaggctatatcgtacctagccattcaaccaaacactgtgtcacaaccaaagatggtgttgtgaaggtattttgcagatgtgataaatatctacagccagctaactttaaggaaaggggattatcctggataatctgggtaggataaatccagttcgttgaaagtctttaagagtagaattcaggtttccctaaggaaaaaagaaattgtgtctatggaccaaagtgtccgcctctgcctgagagtttctagcctgccgttcctgatggcctgccctgcacatatcagacttgcctaccttgcccccataatcacagaaaccaattcctcacaataaagctctttcctctctctctctctgtgtgtgtgtgtgtgtgtgtgtgtgtatgtttctgtgtgtgacacaaaaagcacccaggagtgctgaacaaacatgatttcttccaactattagtgtcctgatgataacccctggggctaattagtccccaagtattcacattgttaactggatagagtgtctgcagggacaaaccctagagccctggatgatagatatgttaccatctcttccctctccctgcctctgatggagtgggctttgtattgatctctacacccaacttatcccagacttaaccctggccctatctctccaacacttgcctcatatttcaccctttagcctgagtcctgagtgataagtaccatctgactttcctactactgtgcccagcctaatttaatggaaacccagtggttaccatttctggaattgaaatgtgtgtcctttagacgcttcaagcgtggctctgcctgtcccagctgcttaggcttctggagtcgtccttgggagccaggtccatcttactgtccaaccttgatgggcagctcttaagccatccccatctcaccaattccatgcagccaccaacagagcatcctgcttcctaatcattgcacaagccatgaaggatggctagaacgatctattccagctaaccatgagtaacccagccatggaacatacagccttttccaaaaacgagtagaacctagttttccaaagctgagcttgaaaatattcggcatgtgtttgtgtggtacattcccaactttgtgactgaagtttcagaaatcaaattcactttcacctagctgtgttgctatgttatctatagttcgtaatgattctgtctctgcaggcaattgcagtatatgctaaattctgtctactctttttttttttttttttttgagacggagtctcgctcagttccccaggctggagtgcagtggcgcgaactcggctcactgcaagctccaccttccgagttcacgctattctcccgcctcagcctcccgagtagctgggactacaggcgcccgccgccacgcccggccaggatggtctcgatctcctgatctcgtgatccgcccgcctcggcctcccaaagtgctgggattacaggcgtgagccaccgcgcccggccctgtctactcttaaatatccatgagaatgggagactgtggagcagatatagagtcttaaaaaaattattcattttagtcatgaattcaacttccttcaccacaaaaacttagatccaagttgtgaacaactaccaagaatgaccaatcagggattccttttatctcctcacttctcccctgatgaaagcatgtaaagcagtgattgaaagccaactacaaaaagggagacatcctcattattcctagacttaatggtggagatttctacagacaatggttgtattcttggccacatcatttaacatccttgaacttcatccaaaactggaaggaactggactttttttccaaggtcccttttgccactgaagtcccatgagccttgagaatcaaagtactgttgagatgtccattcacccaaggaaggaggagataagggcaggcaatcagaagtcctgtttgcatgaggttctcctaagctccataggcagtggcagtgggctaatcggtaaaaatatggccagtacaacgtgaaggcccactgcatataatggcaggaagaactcactcactttctctttccagaagattttttttttttttttggaaacaggtcttgctctgtggcacaggctggagtgcagtggtataactggctcactgcagcctccatctcccagtctcaagtgatcctcccacctcagcctcccaagtagttgggaccacaggcatgggccacaacaccacaacacccagtttttttttttttgtcttctaaattttgtacagacagcatctcatgcttcccagactgatgctgaactcttgagctgcggcaatcctcctatcttggcctctcaaagtggtaggattacaggcgtgagccaccatgcccagttgaaagtaagttgaactaagcagaattgggctttgaatagtgaaaaggaactggaacagtgtttgctgttgttttatttttctaatggtggtggaagggacgatgctacagggtagacttctaagttctggatgctgtcagagtcagacagagaatcaggcagctgctgagatgcctgggtcttatggagcccgggcagaagcccatcctgcccaggtctgttgtgacccggcactcttgtcagtatcacttcgtgctcaccccagccccactcaagcaccattggtccaccttagtttcacctcgtcactgcatcagcaaaagggattttgggactgagaataaagttctcccattaggagagatgaaagctgctccaactctgaggagagagtccccgaaaagaacagaaacttaccatcagattgaagagaaggggacgtgttccttttgcgaccatgagctgaggttgttgagcatgcctgagagagtggtgcagactagggtcacaggaatagtgacccccctctagcccagaacctgatgaagataaatctctccgtgtctataaggatctggcgcaatctggagaaataagggtcatatgtaaataaacctaattggattgaagggaactgagaggatagaagttaattcctgtaaatttggattgatgccactaatacctcccaatgtaggccagaccatgggcaagagaatatgaattgagatgaatctaagttttctgttttttaaaggctttagatagttttctgacaagttagatcttccttagtcataatagatataaggccaggcatggtggctcatgcctgtagtcctgttattggaaaggggttcttatccagaccccaagagagggttcttggatcttacacaagaaagaattaggggccagtccacagactaaaatgaaagcaagtttattaggaaagtaaaggaataaagaatggctactccatagacagagcagccctaagggctgctggttgcccatttttatggttattttttgatgatatgctaaacaaggggtggattattcatgcctccccttttagaccacataggtatcttcctgacgttgccatggcatttgcaaactgtcatgctgctggcaggagtgtagcagtgaggacaaccagaggccactctcatcgccatcttggttttggtgggttttggccagcttctttactgcaacttgttttatcagcaaggtctttatgacctgtattttgtgccaatctcctatctcatcctgtggcttagaatgccttaactgtctgaaaatgcagcccaataggtctcagcctcattttacccagcccctttccaagatggagttgctctggttcaaatgcctctgacaatcccagtgttttgggaggctgaagtgagaggattgcttgagcccaggagtttgagaccagcctgggcaagatagcaagaccctgtctctaaaaaaaaaaaaaaaaattagccgggcatggggagctatgatcctcccactgcacttcagcctgggtgatagattgtctcttaaaaaataaataaataaataaataaataaataaataaataaataaacgaatacatacctctatgtagagaacaattgttttttattttatttttatttttattgaaacagtgtctcactctctcacccaggctggattgcaatggcgcaatttcatctcactgcaatctccacctcctgggctcaagtgatcctccctgcctcccgagtagctgggactacaggaacatgccaccacaccgagctaactggctaatttttgtattttttagagacagggttttgccatgttgcccaggctggtcttgaactcccggattcaagtaatcctccttccttggcctcccaaagtgctgggattacagccactatgcccagcctaacagttgttttttaaattgagataagataatagcataacataaaatttgccacttaaagcacttttaaatatacagttctgtgacattaaacatattcacattgttgtgcaatcatcaccactatctatctccagaactcttcttgcaaaactgaaacttgtacccattacacaacaactcattttgccctcccacccagcctgtggcaaccacaattctactttctgtctctatgaatttgactaccctagatatgttatataagtggaatcatacagcatttgttctttgtgtctagcttaatttacttagcctcgagattcatctatgttatgttaagaattcccttccctttttaaggctgaataatattacacacacacacacacacacacacacacacacacacacactatattttctttctttttttttttttttgagacagagtttcattcctgttgcccaggctggagtgcagtggtgcaatcttggctcaccacaacctcccgcttctgggttcaagcagttctccagcctcagcctcccgagtagctgggattacaggcatgtgccaccacacctggctaattttgtgtttttagtagagacacagtttctccatgttgatcaggctggtgtcgaactcctgatctcaggtgatcctcctgcctcggcctcctaaaatgttgggattacgggcatgagccaccactcctggccgccatattttctttatccatccatcagtggacatttgaattgtttctagcttttgactactgtgaacaatgcagctacaaacattggtgtgtaaatctctaagaccttgttttcattcttttggatggaagaatggactacccaggagtggaagtcccaagatcagcagtttgcaagctgtagtatcaagagaactgataatatatttccacactgagtccaaaggcctgagaaccagaagaggcaatggtgtaagttctagtttaagttcaagtccaaaggcagggggaaactgacgtcccaggtcaaagatcagatcagatacagtgaatccttccctactcagccttttgttccattcagggccttcaatgggttggatgaggcctactcacattggggtgagcaatctactttactgagtctactgattcaaatgttaatctcatcctgaaacaccttcacagacacacccagaataatgttttatcgaatatttgggcacatggtggcccagtcaagttgtcacataaaattaaccatcacatatgcaaattctctgtttaatattttaaggaaccaccatattgttttttatagcagatgtaccattttactatccctccagcaatgcacaatagttccaatttcctcacatccttgccagctcttgttgttttctggttgttgttgttgtttttttaatagtagccatcctagtgcatatgaagtatacttcttccatcatgggtataatttttatttccctaatgattagtgacattgagcatctttttcatgtgcttcttggccatttatatatcttatttgaagaaatgactattcaaatcatcaatttttattattattatgttttaagttctagggcacatgtgcaccacgtgcaagtttcttacataggtatacatgtgccatgttggtttgctgcacccatcaactcatcatttacattaggtatttctcctaacgctatccctcccccaggcccccgccccacaaaagtcccagtgtgtgatgttcccctccctatgtccatgtgttctcattgttcaattcccacttatgagtgagaacatgcagtatttggttttctgtccttgtgatattttgctgagaatgatggtttccagcttcatccacgtccctgcaaaggatataaactcatccttttttgtagctgcatagtattccatggtgtatatgtgccacattttctttattgcgcctattattgatggacatttggggttggttccaagtctttgctattgtgaatagtgccgcaataaacatatgtgtgcatgtgtctttatagtagcatgatttataatcctttgggtatatacccagtaatgggatccctgggtcaaatggtatttctagttctggatccttgaggaatcaccacactgtcttccacaatggttgaattaatttacactcccaccaacagtgtaaaagtgttcctatttctccacatcctctccaacatctgtggtttcctgactttttaatgatcgccattctaactggtgtgagacggtatctcattgtggttttgatttgcatttctctgatgaccagtgatgatgaccattttttcatgtgtctgttggctgcataaatgtcttcttttgagaagtgtctgttcatatcctttgcccactttttgatgggtttgtttttttctggtaaatttgtttaagttcattgtagattctggatattagccctttgtcagacggagagattgcaaaaattttctcccattctgtaggttgctgttcactctgatggtagtttcttttgctgtgcagaagctctttagtttaattagatcccatttgtcaattttggcttttgttgccattgcttttggtgttttagtcattaagtccttgaccatgcctatgtcctgaatggtattgcctaggttttcttctagagtttttatggttttaggtcttatatttaagtctttaatccatcttgagttaatttttgtataaggtgtaaggaagggatccagtttcagctttctgcatatggccagccagttttcccaacaccatttattaaatagggaatcctttccccgttgcttgtttttgtcaggtttgtcaaagatcagatggttgtagatgtgtggtgttatttctgaggcctctgttctgttccactggtctatatatctgttttgatgccagtaccatgctgttttggttactgtagccttatagtatagtttgaagtcaggtagcgtgatgcctccagctttgttctttttgcttaggatcatcttggctacttgggctcttttttggttccatataaaatttaaagtagctttttccaattctgtgaagaaagtcagtggtagcttgatggggatggcattgaatctataaattactttgggcagtatggccattttcacaatattgattcttcctatccatgagcatgggatagtcttccatttgtttgtgtcctcttttatttcattgagaagtggtttgtagttctccctgaagagatcctttgcatcccttgtaagttggattcctaagtattttattctctttgtagtaattgtgaatgggaattcactcatgatttggctctctgtttgtctcttattggtgtataggaatgcttgtgatttttgcacattgattttgtatcctgagactttgctgaagttgcttatcagcttaaggagattttgggctgagacgatggggttttctaaatatacaatcatgtcatatgcaaatagagacaattttacttcctcttttcctaatcgaataccctttatttctttctcttgcctgattaccctggccagaacttccaatactatgttgaataggagtggtgagagagagcatccttgtcttgtgctggttttcaaagggaatgcttccagtttttgcccattcagtatgatattggctgtggatctgtcataaatagctcttattattttgagatacattccatcaatacctagtttattgagagtttttagcattaaaggctgttgaattttgtcaaagaccttttctgcatctattgagataatcatgtggtttttgtcattggttctgtttatgtgatagattacatttattgatttgcatgtgttgaaccagccttgcatcccagggatgaagccaacttgatcgtggtggataagctttttgatgtgctgctggatttggtttgccagtatttcactgaggattttcgtatcaatgttcatcagggatattggtctaaaattctcttttttgttgttgtgtctctgccaggctttggtatcaggatgatgctggcctcataaaatgagttagggaggattccctctttttctattgattggaatagtttcagaaggaatggtaccagctcctctttgtacctctggtagaatgtggctgtgaatccatctggtcctggacttttttttttggttggtaggctactaattattgcctcaatttcagaacctgttattggtctattcagagattcaacttcttcctggttcagtcttgggagggtgtatgtgtccaggaatttatccatttcttctagattttctagtttatttgcatagaggtgtttatggtattctctgatggtagtttgtatttctgtgggatcagtggtgatatcccctttatcattttttactgtgtctatttgattcttctctcttttcttctttattagtcttgctagtggtctatcaattttgttgatcttttcaaaaaaccagctcctggattcattgattttttgaagggtttttctttttttttttgtctctatctccttcagttctgctccttatcttagttatttcttgccttctgctagcttttgaatttgtttgctcttgcttctctagttcttttcattgtgatgttagggtgtcgattttagatctttcctgctttctcttgtgggcatttagtgctataaatttccctctacacactgctttaaatgtctcccagagattctggtatattgtgtctttgttctcattggtgtcaaagaacatctttgtttctgccttcatttcattatttacccagtagtcattcatgaactagttgtttgatttccatgtagttgtgcagttttgagtaagtttcttaatcctgagttctaatttgattgcactgtggtctgagagacagtttgttgtgatttctgttcttttacagttgctgaggagtgttttacttccaattatgtggccaattttagaataagtgtgatgtggtgctgagaagaatgtatattctgttgatttggggtggagagttctgtaaatatctattaggtccacttggtccagagctgagttcaagtcctggatatccttgttaattttctgtctcatttgtttgtctaatattgacagtggggtgttaaagtctcccattattattgtgtgggagtctaagtctctttgtaggtctttaagaacttgctttatgaatctgggtgctcctgtattgggtgcatatatatttaggatagttagctcttcttgttgcattgatccatttaccgttatgtaatggccttctttgtctcttttgatctttgttggtttaaagtctggtttatcagagaccaggattgcaactcctgggttttttgtttttgttttccatttgcttagtagatcttcctccatccctttattttgagcctatgtatgtctttgcatgtgagatgggtctcctgaatacagcacactgatgggtcttgactctttatccaatttgcccgtctgtatcttttaattggggcatttagctcatttaaatttaagattgatattgttatgtgtgaatttgatgctgtcattatgatgctagctggttattttgcccgttaattgatgcagtttcttcatagcattgatagtctttacaatttggcatgtttttgccgtggctggtactggttgttcctttccatgtttagtgcttccttcaggaaccgttgtaaggcaggcctggtggtgacaaaatctctcagcatttgcttgtctgtaaaggattttatttctccttcacttatgaagttttgtttggctggatatgaaattctgggttgaaaattcttttctttcagaatgttgaatattggccgccactcttttctggcttgtacgttttctgccgagagatccactattagtctgatgggcttccctttgtgggtaacccgacctgtctctctggctgcccttaacattttttctttcatttcgaccttggtgaatctgagaattatgtgtcttggggttgctcttctcaaggagtatccttgtggtgttctctgtatttcctgaatttgaatgttggcctgccttgctaggttggggaagttctcttggataatatccaagaagagtgttttctaacttgcttccattctccccgtcactttcaggtacaccaatcaaatgtacatttggtcttttcacatagtcccatattttttggaggctttgttcatttcttttcactcttttttctctaattttgtcttcctgctttttttcattaatttgatcttcaatcactcatattctttcttccgcttgatcaattcggctattgaagcttgtgcatgcttcatgaagttctcgtactgtggttttcagctccatcaggtcatttaagctcttctctacactggtgattctagttagccattcatctaactttttttcaaagtttttagcttccttgcgatgggttagaacatactcctttagctcggagaagtttgttattaccgaccttctgaagcctacttctgtcaactcatcaaagtcattctctgtccagtttcgtttgcttgctggaaagttgtgttcctttgaaggagaagaggcattctggtttttggaattttcagcctttctactctggtttctccccatctttgtggttttatctacctttggtctttgatgttggtgacctacggatggggttttggtgtggatgtcctttttgttaatgttgatgctattcctttctgtttgttagtgttccttctaacagacaggccccccgggtgcaggtctgttggagtttgctcgaggtccattacagaccctgtttgtctcggtatcaccagcagaggctgcagaacagcaaatattgctgcctgatccttcctctggaagcttcatcccagaggggcccctgcctgtatcaggtgtctgtcagaccctactgggaggtgtctcccagtcatgctatacaggggtcagggacccacttgacaaggcagtctgtctgttattggagctcgaatgtcatgctgggagaaccactgctctcttcagaattgtcaggcagggttgtttaagtctgcagaagctgtctgctgccttttgttcagatatgccctgcccccagaggtggaatctagagaggcagtgggccttgctgaactgtggtgggctccacccagttcaagcttccctgccactttgtttatactgtgagcatagaaccacctactcaagcctcagcaatggcggatctccccatccctaccaagctccagcatcccaggtcgatctcagactgctgcactagcagcgagcaaggctctgtgggcataggacccgccaagccaggcacaggagggaatctcctggactgccagttgcaaagaccatgggaaaagcacagtatttgggctggagtgtaccattcctccaggtacagtcactcatggtttcccttagctaggaaagggaaatcccctgaccccttgaacttcccgggtgaggtgatgccctgccctgcttcggctcaccctctgtgggctgcacccactgtccaaccagtcccaatgagatgaaccaggtacctcagctggaaatgcagaaatcacccgtcttctgcgccaatctcgctgggacctgtagaccggagttgttcctatttggccaccttgaaagtgaccctaaatcatcaattttttaattggattgcttggtttctttggtgtggttgagttataggagttctttctatattctagatgctaatctcttatcagataaatgatttgcaaatattttctcctaaaaacaattgttcaagttgacatgttgatatagtttgaatgtatattcccaccaaatttcatgctgaatgataacccccaatgttggaggtggggtctggtgggaggtgtttggatcatgggggcagatctctcatgaatggcttgggccatcctctttggtaataaatgatctcttggtctgagatctggttgtttaaaagtgtgtggcatggcccctactcttgtgcttactcttgttcccgccatgtcatgtgcctgctcgccctttgccttccaccatgattggaagcttcctaagacctcccaagaagcagatgctgatatgcttcctgtgcagcctgcagaattatgagccaattaaatatattttctctataaattatacagtctcaggtctttctctttctttcttttccttccttccttccttctctctctttcttctctgtctttctttctttctctttttctctcttctttctctttctctttcttttcttttctttccttttctttctttcgagacaagatctcactctgccacccaggctggcgtgcaatggcttgctcatagctcactgcagacttgatttcctaggctcaagcaatcctcttgcttcaccttcccaagtagctgagactatctgggtaggtgtgagctatgaggtgtgagccaccacgcccagataatttttaaactttttgtagagatgggtttttgctatgttgcccaggctgttctcaaatgcctggcctcaagcaatcctggccccgtaaagtcctacaattacagccgagatccgccatgctctatttctctattgcaatgcaagaagggcctaacatacatgtcttaattgttttttaagccagaagacatgtcatcaacaaaattcatatgttcaagccttaacgttcaatgtgactatatttagacatagagcctatgagaaggtgataaaggttaaatgacatcataagggttagaccctaatcctatagaactgatgcccttataagaagagacagagcagccgggcgcagtggctcatgcctgtaatcccagcactttgggaggccaaggtggggagatcacttgaggtcaggagtttgagaccagcctggccaacatggtgaacctccatctctattaaaaaaatgcaaaaactagctgggcgtggtggtgggcacctgtagttccagctactcgggagcctgaggcaggagaattgcttgaactgggagatggaggttgcagtgagccgagatcacgccactgcactccagcctgggcaacagagcaagaccctgtctaaaaaaaaaaaagaggcagagcctgggtacagcagctcacatctgtaatcccacactttgagaggctgaggtgagaggatcacttgaggccaggagttcaagaccagcctgagccacaaagtgagatcctgtctctataaaaaataaaacttagccaggtgtggtagtgtgtgcctgtagtggcagctactcaggaggctgaagctggaggctcatttgaacccaggagttggaggttgcagtgagctatgattgcaccactgtactccagcctgggcaacagagtgagaccctgtctcaaaaaaaaaaaaacaaaaaaaaaaccctaaaaaaaaaaaaagcagaacaggcagaggtacaaggctcttggtctgtctgtctgtctgtctgtctgtctctctctctctgtctttctcactctctgtctctaccatgtgaggacacagtgaaaaacaggccatctgcaagccaggaagaaggccctcaccaagaacaaaaccagctgatatcttgatcttggacttttcagcctccaggaatgggagaaataaatttttgttgcttaagccacccaatctgtggtattttgttatggcagcccaagctgactactatgacgtatattttatgattaaactagtgatacatgctgatgggacagtttcaacaaacataaaaggaataaagaagtaaaaatcatttgaaaccctgaaacccggagataatcatgttatgttatgcatccttccaggcttcttcctatgcatgtagaaaacttttcacaatccagatgctgttttgtaaccttttcttagcaataaacacaagtgtacatgatggttttgttttggtttgtttggtttttttgagacggagttttgctcttgttgcgcaggctagagtacaatggcgtgaccttggctcactgcaacctctgcctcccgggttcaagcaattatcctgcctcagcctcctgagtagctgggattacaggcatgcgccaccatggccggctaattttgtatttttagtagagatggggtttctccatgttggtcaggctggtcttgaactcctgacctcaggtgatctgcccacctcagcctctcaaagtgctgggattacaggcacgagccaccacgcccggccacgtggtcgttttaatgcactgcaaaatactccactgaacagatctaccataatgtatttaatcagtcccctagtgatagagatgtaggtgatttctaatttatcattattgtaaacaatgcttcatgaaggccttttatgtatatctttgcatgtttgtccaatttgttcagtgggatgaattcccagaaattaaatttctgggccaaaggatatgcttatttaaaatgttgacatcctgtatattgccaaattaccttccagaaaggctgaaccaatttatactcctactgtgcatgagagtgcccactgctccacacccttgccaaactggcatgctttcaacagcagtaaaaataggttcttgtctgcttttctcctatgagtcctaccaagtgcatgatgtgaaagtgaatgagaggaatataaagttgacagatgggaggtattttggtcactgtaatgttttatctaaagcacaccattttcctctcaaaacaagtgtgatagataagcccccttcattttttagtacaagttctaggacataatttcctaaatggattgattccttagagaatgaatgtctctgaggatgtggaaattattcaagccaaatgtgctttgggctgatagaggatatacaattttgacatagcagtatctatgtgacctcttttttaaagatgcaaagtataatatttttgccctgtgctatccaaagtgtcatactgcagcctactctgaatgtactcattcatttgcctgaagttcccacagagaaaagttttctctgactttgttttatattgaaaaagttttttaattgaagtataatttacacacaatatgaataatttttctctttaaaatctgattgtgaataactgcaaccttcatagataacctttcattacattaaatgagagagaaaagctcttttttttcctcgagacagagtctcactctgttgcccaggccggagtgcaatggtgcaatctcggctcactgcaacctttgtctcctgggttgaagccatcctcctgtctcagcctcccaagcagctgggattacaggggtacgccaccacactcaactaatttttgtatttttagtagtgacaggactttaccatgttggccaggctgatctcaaacccctgacctcagctgatgctcctgcctcagcctcccaaagggctggaattacaggtgtgagccttcgtgcccagcagaaaagcttataattaaacacacactctttgaaaagcacagagaaaagagaatggagttttacatgcagctatttcactccttagttgtatggtctgaagcacataatttagcacaatacgcttcttttactctcatctgataaactagcaaaatgaaatctacactaccttctccatagagatgttggaagcacatccaatatctctaggaaggtccttagcactatagtgagttaaattatatatatttttaaaaatgtgcatccagtcaaatatatctaatctacttgtatctgatcttaaagtttttgtgcttgaggggaatgtatttctttttcaaatgaaaacatgttgatcagataaatgtttacgatggaaaattatccttttgttttggcattaatgtcaattaaaagcattctgaaactgttcagcttcactgatgatattaatgaaccttacatgagaaaaagccagaaaataattagcataattataaaatgtgaactgtacattaataattctctttgttttttcccttttagccacttaataaattgtgtgtatcaaattattataaatgtggtacttctgatgttagcagaattatgttttaaaaggcataacaataatatttgtttaatttagaaaaaagaaagatcactttacatcctgttatcctagtgatactgtgaatacaattggttaatgcaaatataattcatactactgaattgtacacttaaaaatggtaagatgataaattttatcatctttataaattttcaaatttatattctaatatcgtctttctttttatttatttatttagagacagggcttgctctttcacccacctggccagagtgcagtggcactatcatagctcactgtagccttgacctcctgggctcaagccatccttctgcctcagcctccctagtagctaggactataggctctcagcaccacacccggctaattttgttttgttgctttggtagagatgagttctctccatgttgcccaggctggtctgagattcctggtctcaagccctcctgccttggcatcccaaagcactgggatcacaggcatgagagccttgccctaatgtgcctgcctgtctgcctgccttccttccttccttccttccttccttccttatttctttcttccttcctcttttttttttcttttttttttttttgagacagaatcttgctcagtcgcccaagctgcagtgcagtcgcacaatcttggctcactgcaacttctgcttcccgggttcaagcaattctggtgcctcagcctcccaagtagctgggattagaggcacgcaccaccatgcctggctaatttttgtattttcagtagagacagggtttcaccatgttggccaggctggtctcaaactcctaggctcgagcaatccacctgcctgagcctctcaaagtgctgggattacaggtacccagcttttctttcaacacactggttaggggtgaatgcttatcccctcagctctctgtctgctccccacgagtgacagcttgggatgcttgggcttcttcccttgtctcactctctcctcgggaaaaagcaccttctttggcaagattgagggaaagaattgctaaatgtgtgactcagcccctctttctctctgagtggccagaccttaaggacttgacttaccttgcaataagtttcctagagtaagccctgccctgcaaaaaggactgaagttagaagaggtttattttaattcagggaagtgagtatcagtaagcccatttggccacagactatgccacattctccaaccagctttattagctgtgaactaatgttttttaaaaaataatttttattgtggtttaaaaaaatagatgacataaaatttatcatcttaccatttttaagtgtacaattcagtagtattaattatatttgcattaaccaatctctaccagtctccagaactttttcctcttgcaaagctgaaactctatatccattaatcaacaattcatcattttcccctccttccagccgttggcaaccaccattctactttctgtgtctatgattttcactactctagatacctcataggagtggaaccatgcagtgtttgtcctttttgtgactggctcatttcacttagcatgatgtcttcaaggctcatccatgttgtagcatggtgtcagaacttccttcctttttaagactgacattttgagctcccagattccctgcttctatgtctccactgactcaaaactgagagctagagggagggtgtaactaattttcatcccctcaagccccatccaactggataatagtgtgttgtggtagacatctattgttttctctggccagggtcaaatagcaaatctggacagaggtaaagtgagactttactcaaaagggttattgcagtaagaggaagaggactattataatagagagaatgctctgatggtcaactgtaagatctgcaagcatctccaagaccaggcagaaaagggcttttcttttacagggaggaggaaagcaggctggaaggaagcaggtgaggtctaccaggatgagcaggttatcctgcggtgcgtcagggaacagttccccctgctgggtacgctagtctcagtaggggccattaaggagggcttgttcctagctctaatgtttaagggtgggccaagttcagggacttggaagaatgacagaggcctgactaaagtttagcccagttagcaggcattttgtccagattggcctgtggaaacaaacaggtcagctaatcatttatgagtcaaagaatgggaaattagaggatctctatatggctttgtcatagttagacaagggggtcactccaagtctctaagtcgtatggggaagggcaattatttgctgtaagtcatttcctggaacacaaaggttggagggaggctgggcgcagtggctcatgcctgtaatcccagcactttgggaggcagaggcaggcagatcatttgaggtcatgagtttgaaaccagatggccaacatggcaaaaccccgtctttactaaaaatacagaaattaaccggcgtgatggtgtgcacctgtagtcctagctacttgggagactgggggaggagaatcacttgaacccaggagacggaggttgcagtgagccaagatctcaccactgcactccagcctgggcaacagagcaagaccttgtctcaaaacaaaacaaaacaaaacaaaaaagttggagggagatggtttcctgatccttgctgttttccaggggcacagggcttgacgttgtcactaataccctttcctactccaggtgttgacagaacccctctttctcatggaaaatccacctcacttattttgagtgaggctgatcccactttctactcatacggatggacatgtggcccaggccttgccaattcaaatcacttattctctgattagtattattgctccagcaaatatgtagatgctccaagcagtaccgatcagtctctcctgagatttgatcatgtagatgctgggagagaaccctgatatgaacccagccatgcctagcttaggtctacctccagacttcccagttatgtgaacaaataaaacccctctttgcttaactgtgtgattcttttgttatcccccaccccacaaataactatgttgtgggcactgaggccttgttggcttggggtgtttgaaggatcctggctacctctgattctggaggatttcaagggtcttattttagttccaacagtgagactgttgactgcagagttgtggctctatttcaagcttgagtaatttcatctgccctccttgaaaaattttactgcaagatatttaatattctttcttccttcatag

SEQ ID NO: 24 - DNA, 10589 bp, Homo sapiens
  source 1..10589: mol_type = other DNA
gtaagtcctggctggatgcagtggctcatgcctgtaatcccaaaactttgggaggccaaagcaggtgaatcccttgagcccaggagtttgagaccagcccaggcaacatagggagagcctgtctctacaaaaagtttaaaaattagctgggtgtggtggcgtgtgtctatagtcccagctactcaggaggctgaggtgggatgattgcttgatcccaggagatggaggctgcagtgagccaagaggtctcacccctgctttggagggaaaaaatatagtatcccaacataaattttttaaaaaaatcctgtttttcctttaaaaaataagctgtaatgccctagatgttaaattgattttcaagttattattattatttttaatagaaatgggatctcatgctgtccccaagctagagtgcagtggtataatcatagctcactgcagcctcaaactcttgggctcaagagatcctcctccctcagtagctaggactacaggtgcatgccaccatgcccagctaagttttgttttgttttgtttttggtctggtagagataaggatctgaatatgttggtttaggaacacctggcctcaaacgatcctcctgcctcggcctcccaaagcactgagattacaggcatgagccaccacaccaggcctcgagttctttttgataaattatatgaacaatagattaacataaagaatggaaggaatcgtttttgcgagttttcagggatagtgcatgaaaaggcctcatagaagaaataaaatggggacactcatataaaccacaaagctttagtttacatttgacattttcccaacttcaacagatagatctacttaatgactagattgatctggtaaattagaaaagtcatgaaatggatcatgaaaatgatttaaaatgttttaattatggaagggaaaaaataagaaatagcagctaatcttcctaagtaaatgtgaaaaaaaaaaaaaaggtaatttaacaaatattcctggaatgccacttatgtgctagtcactggggatatagcaatgaacaacacagacaaaattttctgccgtcatgaatcttctagtaaaaaatgcaccaataaaataaaatgatgaatctccaagaataaacaacatttgtgttcccaaggcaagggagcctttcactgacttgacattttgctgctctctgtttgctggaaattgccctataccagcctgggcaacatgacaaaaccccatctctaccaaaaccacaaaaattagccaggcatggtggtgcatacctgtggtcccagctactcaggaggttgagatgggaggatcacttgagcccaagaggttgagatcgcagtgagctgagatcacgccactgcactccagcctgggtgacaaagcaagactctgaaaaaaaaaaaaaaaaaaagaaggaaggaaggaaggaaaaataaattgtactataccaaaatgttacagtgttcatctctgagtgatttttttatttctccttaatattcttctgcattttccaaattttctacaataagcttctattactttttaatcagagaagtaacttattagggggaaaaaaccctaataaactagaagttgaaatccttcagtgcagagggctgacctgaatacttgcctttggcaccttcctgaactgaaaaagtctaaaaagcaggacttgttgctttcactttgggtaactgtccccctccctcctctcattcttgagctttcctgatgtatcctaaagcaatttgttttatagtatcacatacctttttttttgttcacttttaaacattctgggtgcctagagccttgtctctttcttgcctctctctctcttcttcctgactacctggttcttctgaccttttctctacaaagatcaccactgttctacctctctgtggaccagataaaccctattactccacattgcccttgtcccttccaagtctaactaccacttttcaacaaactgaactctctctcggttactatggcatcccctgaaaaaatgtcagtcaaagctttctcctatacgcttacatttctaaaagttgtttaacaaatttacgaaagaatttttttagcccctgatgggccgaagcattatgttacagtctttgagaacttaaggtcataatagataattctttcattttgttttttataattggtttaatcagaattttattgttacaatcaatagttgctttacttttctctctctttagtttaaagaaatccctagcagtttccctatttttttttattggttcttagtatgaaagttgcattgacttttttttttttttttttttttttttgagatggaggtttgctcttgtcgcccaggctggagtgcaatggtgtgatctctgctcactgcaacctctgcctgccgggttcaagcgattctcctgcctcagcctcccaagtagctgggattacaggtgcctgccaccatgccaggttaattttttgtagttttaatagagacagggtttcaccatgttgaccacgctggtctcaaactcctgacctcaggtgatgcacctgcctcagcctcctaaaatgctgggattacaggtgtgagtcaccacacacagccacattgacttttatcaatgtaaagggagaagtcacttgatatttaggtaaattgtttaatagtattttatctacttttttcaaattggtaaggtgtatttttcatgccttaaaaatgtctttattgaagtataacatacagtaaaatacatttagtgtatttagtgagctttagtgtacaactcagtttttttttttaacataggtatattcccatttaaccaccaccagctcaagacacagaacactcccagcaaccccacaatttctcttatctcttcccagtcaatatcctcttgccccatactcctagcctactcttgccagaatagttaccactattctgacttctatcaccatttataagttttgcctatttttaaacttgaaataaacagaaccacccagtatttactcttttgttttggcttctgtaactcaacattattttcctgttcagttgcgtcatcatttttttcttttttattactgtatggtattccattaaataaatatacttcaatttatatatctattctcctgttgatggacatttaggggtttttcgattttttagtatgatgagaaaagttattacaaacattcttgtacatgtctgttggtggacatatgcactcatttctcttgggtatataccaaggggtggaattgctgggtcgtagagtagacatacttctacttttggtaaaattcttaacatatttgcatggcacaaaattcagcaggcacaaaagagtgtacagtgaaaagtctctctcttatctacatctcagttctacagttctcttctccagaggaaaccatattaccagtttcttacggaaacatactttgtatatagaagtatatgtatgtatagtcttgtgttttacaccaaagctactacacaatccaaactcctttacaccttacttctttcactaaacaatttatctttgggattagtctatattagtaacgttgaactgcttcattccattaaagcagcggccctcaaactttttggcacaaggcactggttttgtggaagacagtttttccacagaggtcaggggctggggagatggttttgggatgaaactgttccacctcagatcatcaggcattagattctcataaggaacacacaacctagattcctcacatgtgcagttcacaaacgggtccgtgctcctatgagaatttattactgcctctcatctgacagaattcggagctcaggccgtaatgctggctcacctgctactcacttcctgctgtgcagcctggttcctaacaggccatggacccgtaccagtccatggcccagaggttgggacccctgcactaaatgactgcatagtatgctaacttgcacatctaagaatatatctgtaggatgaaaacagctttgggcatttaaaattttgccttaattatataagaaagcctgttttcccccactttcaccaacacaatgagtttgtagacattttaattcttgctagtcttaggtggaaaatggtatctcattgtacccttaaatcttaaatctcccttaatataaggaaggtctttccatatgtaaagatttatttttatttcctgacctgtaagctgtttatattgtttgtgtatttttcttcgattattttttcttattttataataattatttatatattaagggaattagccctcggtctgtgatatgagttacacttttttaaatgaaaattattttattttaattttgagacaaggtctcactctattgcctaggctggagtccagtggcacaatcatggttcactgcagcctagacctcccaggctcaagagatcctcccacctcactcccacctcagcctcctgagtagctgggactacaggtgcacaccaccacacggggctaactttttttttttttttttttttagagatggagtcttgctatgttgcccaggctggtcttgaacttctgggctcaagcaatcctcccagctcagcctcccaaagtgctgggattacaggcatgagccaccacctctagcctgaaactcatataatacatagcaatttaagctcccacatatattaatttagaaaggattgcaacttaacaaacatttattgtgccaggcactgcgaaaagtgctgaatatataataaagattgatttgtacctttaaaacacttacaatctaagaacagaaagacactcccaaaccaaatgatcattactttatcatttggtaagttttattataggatagacgtgtacactacatgcacttcaagctcaacgtgtccaaaactgagtttgttgtcttcttctaggacctctttttccattgttccgtatcacagataatggcatcattagtcactcagctgctttgtttagaaaccttggagtgatccttgagtcctttctctccttcactctcaaaatggatttgccatttatctgaaagatcattgtgaaggactgtaggaaggaggaggctggtggctgagaaactattaattgcattagtccagatagcaatcgatgaggtagcaaccatgagaatggggaagaagacagaagagggacttgatgatttttaagtatagccagtgaggaagagttggggataagttccacatttctggctgagtggatgatggaagtcatgcatagagatggggatggagtgcgtaactgtttcaggaagggaaagatacaggattcagtttagacattttgtgtttgaggtctggtgtgacaaccaaatataattttaagtacagtactgccaactcccactttcctgaggtcataaaagggcatgttactatggttaattaaaaatcgatatggataattcttaaactgtccctctttattgctcacggctttcctgggtgttcacagtcttcctgggcgccctggtcactggccctgatccagccacaccttctcacaggtactcttatgaaaattaagccctgaaataggcagaatattgtctggtttgagtctcacaactttttctcctagatagaattaaggaggcaatgaacagccaaaacagaaacaggagggagttgtgagagagtagcaaaggggttgaataatttgaagcatagttaattggcctttgaataatcagattgctacaaaagtatcagcttatttacttttgaaatattatattacccccataccaggaaaataaaggaatgagggggaaattacctataatccagtcactcccataggaccactctaagcattatgtaatactatactcgctcccattttttcccagcctccttttcaaatggttataagtcacagtgtaatcattaattgtctaaaatgaatagtggtatcctggtggcataagataatttttataagtggccttagaggaacattgaatataaagtaaatgatcattgtaccctctttaccctgctataaatcattactctctttaaggacatagaaggaaatgtgggcttatgttccaggtacctaacatacaaacaggaagtcgtgcagacctgagacagtctggtatattagcactgaaatacagctaccttttaaattagtaagaacttttttttaacttatgtatgttttgtggcatggtagcatgaaaagatcactggtcttagaggtgggagactcaggctatagtcctagctttggcattaactgtgtggtcttgggtttagttttccttctgtactaaatcaattcagatctcccgcatacctgtcagtgagtgcgttaatgtgaccctgtttgtccgtgcctgatacatgcccacccctgaagctggaggtgagatcacccctctctacactaaaaagaccttgagtcgggaaagagtccagcccccagaattccatgggatgggttgttaccagaaggggaaatggatttgagcaggcaaaaacactagatgttatctaactttgttctccgtatctttatccccaaaatgaagggattggtgtaaaaagttctattaataagtctctctagatctgccttcacaggattgaaagtacagaattgtaccagttgaagtatgaaaaaaactatgctcttcatttgacttctaatttgtggtatctactctctatgacttcagggcaatttcatgagttcagaccaggagttttaaaccaggttcctgagtgactttcctgtttttgtgagctgtctgtgtatacttcctgcagagagaatgttttattaatagcaacatatgccctgaaacaacatacttctttgaccccaacaccgtttttatctttggaaaaccgatgatgtgttactaagtgttaagaatagtttattatttactgtgcagttgccaaaccgaatttatttttactcaaactggacagtacctggctaatacaatgactcccccaaattcaagtttttcgcggcatgtcgtcttattctacaagctgggagagtgtgtgagatcaaaggaatgtgcaaacaggccggagccatggctcacgccagtaatcccagcactttggaagcccgaggcaagcggatcacttgagctcaggcattcaagaccagcctgggcaacatggagaaacccggttgtattagggttctcttagagggacagaactaataggatatataaaatattatatatatatatcatatatacacatatatcatatatacatacatatatatcatatatatacacatatatatatcatatatatgagagtttattaagtattaacttacatgatcacaaggtcccacaataggctgtctgcaagctgaggagcaaggagagccagtccaagtcctaaaactgaaaaacttggagtacaatgtttgagggcaggatcagcatggcagaaagataaaggctcggaggctaggcccatctctttttcacatttttctacctgctttatattcactggcagctgattaggttgtgcccgccagattaagggtgggtctgcctttcccagcccactgactcaaatgttaatctcttctggcaacaccctcacagacaaatccaggatcaatactctgtatctttcaatccaatgaagttaacagtattaaccatcacactggtctttgcaaaaaggacaagaattagccaggcatggtggcacatgcctgtggtcccagctacttgggaggccgaggtgggaggatcacttgagcctgggggacagaggttgcagtgagccttgattgcactactgcactccagcctgggtgacagagtaagaccctgtcgaaaaaaaaaaaaaaaaaaggaatgtgcaaacatactttaagcataattttgccctgacaactcttttttccccaatctctacttgaacgattatttttaatgggactggctctgacaaaataatcctcacaggacctttaaattacataattaagcagaataaaacaatgtataataaaaagtttcctgttcttcaattctaatagcaaatttgcatatatattctctccattagcaaactgggataataatagtggctctctatctcagaaggttgttgaactgattaaaacgagataatgcatgtaaaatacgtggcacaatgtttgatgcaaacaaaatggccataaatattagctattactgttttaccatccataaaaagaatataatgcctacctcagagggtgattctgatgatcgaaagggatacaaagtgtttaacaggccagcacagtggcttcacgcctgtaatcccagcactttgggaggctgaggcgggcagatcacctgaggtcaggagttcgagaccagcatgaccaacatggagaaatcccatctctaataaaaacacaaaattagccaggtatggtggcgcgcctgtggtcccagctacttgggtggctgaaatgggagtatcgcttgagcctgggaggcagaggttgcagtgagtctagatctggccactgcactccagcctgggagaaagaacaaaaccctgtctcgaaattaattaatgtaattaaatgtttaacatatgtttaaaacacacatatataagcatataaagtgtttaatatttaaaaataatttctgctgctgctaatagaagaaatttgtggctgtttttaaggaataatagaatttccaaaatcagtgtctagcaacatttaccttactcatgaatttaaaaaaaccttctgattagaataccagtttcactgctgtttaatagtttaaccctattttgaatcagcaaattagtgttatggttaattttatataaaacataatgaaatgcatgtcccagctctgtcatcaagcagctattccatcttgggcacattcttaatgtttctaggccttccttaccttatcttttaaagggctattataatacttatcttgtgtacttcccatcataataataaaatattatgtgaggttgaaaatttccttatctttaaaagggctataataatacttatcttgtgtacttttcgtcataataataaaatattatgtgaggttgagttgattaaagaaccttgtaaagggtcaaaagaataacaatctggcagggagcggtggctcatgcctgtaatcccagcactttgggaggccgaggcaggcagatcacctgaggtcgggagtttgagaccagcctgaccaacatggagaaaccccatctctactaaacatgcaaaattagccgggtgtggtggtgcatgcctctaatctcagctactcaggaggctgaggcaggagaattgcttgaacctgggaggtggaggttgtggtgagccaaggttgggtcattgcactccagcctgggcaacaagagtgaaactccgtctcagaaaaaaaaaaaaagtaacaatctaacaataatttcttgacttgtcatgtaccaactaaatgccaagcctatgctaactgctatatttatattgtctcatttaattctcacaacagctccattaagtagttgctatttttatgtttattttacaaatgaggatcctaagtcttagagatgttacgtaacttgcttaaagtcacatttcatattaaatgtgcaaataaacatctattcaaactccagattactcttaacctttctactataaaaatgcaagttattattatttttgtataataagcagttttttttaatgacatcgtggtagggaagcccatagaggtgattattcaaatagtaattttttttttttatgagacagagtctcactctgtcacccaggctggagtgcagtggagcaatcttggctcactgcaacctccgccccatgggttcaagcaatcctcgtgcttcagcctcccaagtagctgggactgcaggcatgtgccaccacttccagctaatttttgtttttgtttttgttttgagatggagtcttgctctgttgccaggctggagtgcagtggtgcgatcccggcttactgcaacctctgcctcccgggttcaagcgattctcctgcctcagcctcctgagtagcagggactaaggtcgctagccaccccacccagctaattttttttgtattttagtagagaagggttttcaccatgttggccaggatggtctcgatctcctgacctggtgatctgcccgcctcagcctcccaaaatgctgggattatagacatgagccaccacacccagcctaattttcgtattttcaatagagacgaggatttccatgtctgtcaggctggtttcgaactcctgacctcaggtgatccacccacctctgcctcccgaagtgctgggattagtcatgagccacctcatccggctcaaatagtaatttactaacacattttactcacacatttctgacatttttaagggaacagtggtaaataaaaatgactactccttgaaatatgtgtttaattttctag

SEQ ID NO: 25 - protein, 5 aa, synthetic construct
GGGGS